(19) United States
(12) Patent Application Publication
(10) Pub. No.: US 2021/0107969 A1
(43) Pub. Date: Apr. 15, 2021

(54) MOLECULES, COMPOSITIONS AND METHODS FOR TREATMENT OF CANCER

(71) Applicants: THE JOHNS HOPKINS UNIVERSITY, Baltimore, MD (US); Y-TRAP, INC., Baltimore, MD (US)

(72) Inventors: Atul Bedi, Timonium, MD (US); Rishi Bedi, San Francisco, CA (US)

(21) Appl. No.: 16/925,068

(22) Filed: Jul. 9, 2020

Related U.S. Application Data
(60) Provisional application No. 62/872,194, filed on Jul. 9, 2019.

(51) Int. Cl. C07K 14/71; C07K 16/28; A61P 35/00; A61K 45/06; A61K 39/395; A61K 38/17; C07K 16/22; C07K 16/32

(52) U.S. Cl. CPC C07K 14/71; C07K 16/2803; A61P 35/00; A61K 45/06; A61K 39/3955; A61K 38/179; A61K 2039/505; C07K 16/22; C07K 16/2827; C07K 16/2818; C07K 16/32; C07K 2319/30; C07K 2317/76; C07K 16/2863

(57) ABSTRACT

The present invention relates generally to the field of multifunctional fusion proteins to counteract immune dysfunction in the tumor microenvironment and more specifically to compositions and methods employing such fusion proteins (either alone or in combination regimens) for treatment of cancer.

### CROSS-REFERENCE TO RELATED APPLICATIONS

[0001] This application claims benefit of priority under 35 U.S.C. § 119(e) of U.S. Ser. No. 62/872,194, filed Jul. 9, 2019, the entire contents of which is incorporated herein by reference in its entirety.

### STATEMENT OF GOVERNMENT SUPPORT

[0002] This invention was made with government support under CA184199 and DE019032 awarded by the National Institutes of Health. The government has certain rights in the invention.

### INCORPORATION OF SEQUENCE LISTING

[0003] The material in the accompanying sequence listing is hereby incorporated by reference into this application. The accompanying sequence listing text file, name JHU4140_1WO_Sequence_Listing, was created on ______, and is ______ kb. The file can be accessed using Microsoft Word on a computer that uses Windows OS.

### BACKGROUND OF THE INVENTION

### Field of the Invention

[0004] The present invention relates generally to the field of multifunctional fusion proteins to counteract immune dysfunction in the tumor microenvironment and more specifically to compositions and methods employing such fusion proteins (either alone or in combination regimens) for treatment of cancer.

### Background Information

[0005] Genetic mutations accruing from the inherent genomic instability of tumor cells present neo-antigens that are recognized by the immune system. Cross-presentation of tumor antigens at the immune synapse between antigen-presenting dendritic cells and T lymphocytes can potentially activate an adaptive antitumor immune response that is mediated by CD4 T-helper cells (T_{H}1) and CD8⁺ cytotoxic effector cells, and sustained by tumor-reactive central memory T cells¹. However, tumors continuously evolve to counteract and ultimately defeat such immune surveillance by co-opting and amplifying mechanisms of immune tolerance to evade elimination by the immune system. This prerequisite for tumor progression is enabled by the ability of cancers to produce multiple immunomodulatory factors that create a tolerogenic or dysfunctional immune cell microenvironment. The tumor microenvironment is enriched with multiple cytokines and ligands that act in concert to alter the recruitment, differentiation, activation, or effector function of immune cells (T cells, macrophages, dendritic cells, NK cells), thereby resulting in key signatures of immune dysfunction that enable tumorigenesis, tumor progression, and metastases: (1) Immune tolerance: via expression of ligands that suppress the activation or function of immune cells (T cells, NK cells, macrophages, DCs) and skew their differentiation toward an immuno-inhibitory phenotype (e.g. regulatory T cells, Tregs); (2) Tumor promoting inflammation; via expression of ligands that skew the differentiation of immune cells toward a phenotype (e.g. TH17 cells; M2 macrophages) that in turn, express cytokines and ligands which promote multiple tumor cell proliferation/survival, tumor angiogenesis, and metastases. As such the key signatures of immune dysfunction in the tumor microenvironment (TME) (immune tolerance and tumor-promoting inflammation) involve complex multipronged cross-talk between tumor cells and tumor-infiltrating immune cells. The key molecular determinants of such deleterious cross-talk involve interactions between ligands expressed on tumor cells and their cognate receptors on tumor-infiltrating immune cells (T cells, macrophages, DC, NK cells), or conversely, ligands expressed on immune cells (e.g. Tregs, TH17 cells) and their cognate receptors on tumor cells or tumor-associated cells (e.g endothelial cells, CAFs).

[0006] Efforts to counteract immune dysfunction in the TME are currently stymied or limited by the following key therapeutic challenges: (1) The plethora of ligands that act independently or in concert to create the dysfunctional TME. As such, therapeutic agents that address a specific molecular determinant fails to counteract other redundant or orthogonal ligands that are concurrently or adaptively upregulated to create the dysfunctional immune signature (immune tolerance or tumor-promoting inflammation); (2) The complexity and promiscuity of ligand-receptor interactions that operate in the TME. Tumor cell-immune cell cross-talk involves multiple autocrine and paracrine ligand-receptor interactions (in cis and trans) that maintain the abnormal phenotype of both tumor cells and tumor-infiltrating immune cells. Many ligands interact with more than one receptor, and in some instances the same ligand can have disparate, opposing, or bidirectional effects when it interacts with different receptors on a T cell; the effect of a ligand-receptor interaction on an immune cell is further influenced by other ligand-receptor signals that may simultaneously operate in the TME; (3) Stifling the molecular determinants of immune tolerance (for e.g. specific immune checkpoints, such as T cell co-inhibitory molecules) may fail to counteract, or even counterproductively exacerbate, ligand-receptor(s) that cause tumor-promoting inflammation and angiogenesis; (4) The selective or preferential localization of therapeutic molecules to the TME is required to effectively disrupt autocrine/paracrine ligand-receptor interactions that are hyperactive in the localized microenvironment of a tumor cell, tumor-infiltrating immune cell, or tumor-infiltrating endothelial cell.

[0007] The present invention describes novel multifunctional molecules that are designed to address these therapeutic challenges that limit current cancer therapy. The molecules of the invention are designed to simultaneously counteract one or more of the key determinants of the key signatures of the tumor microenvironment: (1) Immune cell suppression and immune tolerance; (2) tumor-promoting inflammation; (3) elevated neoangiogenesis. These signatures are ubiquitous hallmarks of cancers that are key determinants of tumor progression as well as their resistance to current anticancer therapies. Since immune dysfunction and angiogenesis are also the Achilles' heel of cancers, the multifunctional molecules of the invention may provide effective immunotherapeutic strategies. The invention also describes methods of treatment of cancers that attempt to address these therapeutic challenges. These methods include but are not limited to methods that utilize novel multifunctional molecules of the invention for cancer immunotherapy, either alone or in combination regimens.

### SUMMARY OF THE INVENTION

[0008] The present invention is based on the seminal discovery that fusion proteins comprising at least one ligand binding sequence of the extracellular domain of a protein and a targeting moiety are effective at treating various diseases and disorders.

[0009] The molecules of the invention are fusion proteins comprising at least one ligand-binding sequence of the extracellular domain (ECD, or “ligand trap”) or fragment thereof of a naturally-occurring protein, or modified version or fragment thereof.

[0010] In some embodiments, the fusion proteins of the invention comprise a targeting polypeptide to which one or more ECDs are fused. “X” is a molecule that is specifically bound by the targeting polypeptide. “Y” is a ligand-binding sequence of an extracellular domain, or fragment thereof. In some embodiments, the fusion proteins of the invention have the structure “anti-{X}-{Y}”, where the ligand-binding sequence of the extracellular domain Y is fused to the targeting polypeptide. In some embodiments, the targeting polypeptide is an antibody that comprises at least one heavy chain and one light chain. In some embodiments, Y is fused to the C terminus of the light chain of the antibody. In other embodiments, Y is fused to the C terminus of the heavy chain of the antibody. In some embodiments, Y is fused to the N terminus of the light chain of the antibody. In other embodiments, Y is fused to the N terminus of the heavy chain of the antibody.

[0011] In some embodiments, the targeting polypeptide is an antibody or other polypeptide comprising a heavy chain and light chain connected by one or more disulfide bonds. “X” is a molecule that is specifically bound by this targeting polypeptide. “Y” is a ligand-binding sequence of an extracellular domain, or fragment thereof “Z” is a ligand-binding sequence of a different extracellular domain, or fragment thereof.

[0012] In some embodiments, the fusion proteins of the invention have the structure “anti-{X}-{Y}-{Z}”, where Y and Z are fused to the polypeptide that binds X. In some embodiments, Y is fused to the C terminus of the heavy chain of the antibody and Z is fused to the C terminus of the light chain of the antibody. In other embodiments, Y is fused to the C terminus of the light chain of the antibody and Z is fused to the C terminus of the heavy chain of the antibody. In some embodiments, Y is fused to the N terminus of the heavy chain of the antibody and Z is fused to the N terminus of the light chain of the antibody. In other embodiments, Y is fused to the N terminus of the light chain of the antibody and Z is fused to the N terminus of the heavy chain of the antibody.

[0013] In some embodiments, an ECD of the invention may be modified in one or more of the following ways: (1) substitution or deletion of residues that are not necessary for ligand binding, (2) substitution of residues to remove N-linked glycosylation sites, (3) substitution, addition, or deletion of residues to increase affinity to one or more of its cognate ligands, (4) substitution, addition, or deletion of residues to improve the expression of the fusion protein, (5) substitution, addition, or deletion of residues to allow for site-specific conjugation of drug conjugates, (6) substitution, addition, or deletion of residues to decrease the specificity of the ligand trap to one or more of its cognate ligands while maintaining or increasing its specificity to other cognate ligands, (7) fusion of non-continuous domains of the same ECD, (8) fusion of domains from different isoforms of the same ECD, (9) fusion of domains from different members of the same ECD family. In some embodiments, any of these modifications refer to the same ECD if they result in a sequence that maintains 90%, 95%, 98%, or 99% sequence identity to a ligand-binding sequence of the ECD.

[0014] In some embodiments, the fusion proteins comprise two ECDs (ECD #1, ECD #2) fused together. In some embodiments, the fusion protein additionally comprises a Fc domain. In some embodiments, the fusion protein additionally comprises a linker. In some embodiments, the structure of the fusion protein is N (terminus)-ECD #1-ECD #2-C (terminus). In other embodiments, the structure is N-ECD #2-ECD #1-C. In other embodiments, the structure is N-ECD #1-linker-ECD #2-C or N-ECD #2-linker-ECD #1-C. In other embodiments, the structure is N-ECD #1-Fc-ECD #2-C or N-ECD #2-linker-ECD #1-C. In other embodiments, the structure is N-ECD #1-Fc-linker-ECD #2-C, or N-ECD #2-Fc-linker-ECD #1-C.

[0015] In one aspect, component parts of the fusion proteins of the invention are fused via a flexible linker. In a further aspect, the flexible linker comprises the polypeptide sequence (GGGGS)n where n is between 1 and 10. In another aspect, the flexible linker is selected from the following list: (GGGGS)3 (SEQ ID NO: 200), (GGGGS)4 (SEQ ID NO: 201), waldo1999 (SEQ ID NO: 202), bird1988-1 (SEQ ID NO: 203), bird1988-2 (SEQ ID NO: 204). In one aspect, a linker may be used to fuse an ECD to a targeting polypeptide. In another aspect, a linker may be used to fuse one ECD to another. In another aspect, a linker may be used to fuse an ECD to the C terminus of the CH3 region of the heavy chain of an Fc polypeptide.

[0016] In various embodiments, the fusion proteins of the invention comprise one or more of the following ECDs: (1) a ligand-binding sequence of an extracellular domain of TGFbR (e.g., TGFbRII ECD), or fragment thereof. In one aspect, this ECD binds TGFb1, TGFb2, and/or TGFb3; (2) a ligand-binding sequence of an extracellular domain of PD-1 (e.g., PD1 ECD), or fragment thereof. In one aspect, this ECD binds PD-L1 and/or PD-L2. In one embodiment, this ligand trap has one or more amino acid substitutions which increase its affinity for PD-L1 and/or PD-L2; (3) a ligand-binding sequence of an extracellular domain of VEGFR (e.g., VEGFR1, VEGFR2, VEGFR3), or fragment thereof, or a fusion of VEGF-binding sequences of one or more VEGFR extracellular domains (e.g., VEGFR1 domain 2 fused to VEGFR2 domain 3). In one aspect, this ECD binds VEGFA, VEGFB, VEGFC, and/or PIGF; (4) a ligand-binding sequence of an extracellular domain of TIM-3 (e.g., TIM3 ECD), or fragment thereof, or a hypoglycosylated variant of TIM-3, or fragment thereof. In one aspect, this ECD binds CEACAM1, CEACAM5, phosphatidyl-serine, and/or Galectin-9; (5) a ligand-binding sequence of an extracellular domain of SIRPa (e.g., SIRPa-ECD), or fragment thereof; or a hypoglycosylated variant of SIRPa, or fragment thereof. In one aspect, this ECD binds CD47; (6) a ligand-binding sequence of an extracellular domain of B- and T-lymphocyte attenuator (BTLA ECD) or fragment thereof, or a hypoglycosylated variant of BTLA or fragment thereof. In one aspect, this ECD binds herpesvirus entry mediator (HVEM); (7) a ligand-binding sequence of an extracellular domain of SIGLEC10 or fragment thereof, or a hypoglycosylated variant of SIGLEC10 or fragment thereof. In one aspect, this ECD binds CD24.

[0017] In one aspect, the targeting polypeptide (TP) comprises an antigen-binding domain of an immunoglobulin, antibody, bispecific or multispecific antibody, antibody fragment, single chain variable fragment (scFv), bivalent or multivalent scFv, Affimer, a ligand-binding sequence from the extracellular domain (ECD) of a receptor, or Fc-containing polypeptide. In certain aspects, the targeting polypeptide is an antibody.

[0018] In some embodiments, the targeting polypeptide is an antibody and this antibody is fused to one or more ECDs. In such cases, the fusion protein comprising an antibody and one or more ECDs may be referred to as an “antibody-ligand trap”, or “ALT”, which are used interchangeably.

[0019] In some embodiments, this targeting polypeptide binds a tumor-associated antigen or tumor antigen. In one embodiment, a “tumor-associated antigen” is a molecule whose expression is elevated on tumor cells. In one embodiment, the tumor-associated antigen is a growth factor receptor or a growth factor. In some embodiments, the growth factor or growth factor receptor may be selected from the following list: EGFR, EGFRvIII, HER2, HER3, PDGF, PDGFR, HGF, HGFR, IGF, IGF1R, VEGF, VEGFR, TGFb, TGFbR, FGF, FGFR.

[0020] In one embodiment, the fusion protein of the invention comprises a targeting polypeptide that specifically binds a tumor cell surface molecule. In some embodiments, the targeting polypeptide binds one of the following targets: CA125, CA19-9, CD30, CEACAM5, CEACAM1, CEACAM6, DLL3, DLL4, DPEP3, EGFR, EGFRvIII, GD2, HER2, HER3, HGF, IGF1R, IL13Ra2, LIV-1, LRRC15, MUC1, PRLR, PSCA, PSMA, PTK7, SEZ6, SLAMF7, TF, cMet, claudin, mesothelin, nectin4, uPAR, GPNMB, CD79b, CD22, NaPi2b, SLTRK6, STEAP1, MUC16, CD37, GCC, AGC-16, 5T4, CD70, TROP2, CD74, CD27L, Fra, CD138, CA6.

[0021] In some embodiments, the targeting polypeptide binds an antigen overexpressed by a hematologic malignancy. In some embodiments, the targeting polypeptide binds an antigen overexpressed by multiple myeloma. In some embodiments, the targeting polypeptide binds CD38, SLAMF7, or BCMA. In some embodiments, the targeting polypeptide is an antibody selected from the following list: MEDI2228; CC-99712; belantamab; Gemtuzumab (anti-CD33 mAb). In some embodiments, the antibody binds CD20. In some embodiments, the targeting polypeptide binds rituximab (chimeric murine/human anti-CD20 mAb); Obinutuzumab (anti-CD20 mAb); Ofatumumab (anti-CD20 mAb); Tositumumab-I131 (anti-CD20 mAb); Ibritumomab tiuxetan (anti-CD20 mAb). In some embodiments, the targeting polypeptide binds CD19. In some embodiments, the antibody binds CD30, or CD22. In some embodiments, the targeting polypeptide binds an antigen overexpressed by leukemia. In some embodiments, the targeting polypeptide binds CD33.

[0022] In the case that the targeting polypeptide is a bispecific antibody (bsAb), it may be an obligate or non-obligate bsAb. In some embodiments, one of the targets of the bsAb is CD3. In one aspect, the bsAb may be a CrossMab or a BiTE. Examples of bsAbs that may be used as targeting polypeptides of the fusion proteins of the invention include the following: CD3×B7-H3 (e.g., orlotamab), CD3×BCMA (e.g., AMG420, AMG701, EM801, JNJ-64007957, PF-06863135, REGN5458), CD3×CD19 (e.g., A-319, AFM11, AMG562, blinatumomab), CD3×CD20 (e.g., mosunetuzumab, plamatomab, REGN1979, CD20-TCB), CD3×CD33 (e.g., AMG330, AMG673, AMV-564, GEM333), CD3×CD38 (e.g., AMG424, GBR1342), CD3×CEA (e.g., Cibisatamab), CD3×EGFRvIII (e.g., AMG596), CD3×EpCAM (e.g., A-337, catumaxomab, removab), CD3×FLT3 (e.g., AMG427), CD3×GPC3 (e.g., ERY974), CD3×gpA33 (e.g., MGD007), CD3×GPRC5D (e.g., JNJ-64407564), CD3×HER2 (e.g., GBR1302, M802, RG6194), CD3×MUC16 (e.g., REGN4018), CD3×P-Cadherin (e.g., PF-06671008), CD3×PSMA (e.g., AMG160, MOR209, pasotuxizumab), CD3×SSTR2 (e.g., tidutamab), CD40×MSLN (e.g., ABBV-428), PD-1×ICOS (e.g., Xmab23104), or PD-L1×4-1BB (e.g., MCLA-145), or CTLA-4×PD-1.

[0023] In one embodiment, the fusion protein of the invention comprises a targeting polypeptide that specifically binds a “don't eat me” ligand or receptor that inhibits the function of macrophages, dendritic cells, or other innate immune cells. “Don't eat me” ligands expressed by cells bind their cognate receptor on a macrophage, dendritic cell, or other innate immune cell to inhibit phagocytosis. Tumor cells take advantage of this anti-phagocytic mechanism and overexpress “don't eat me” ligands in order to inhibit innate immune cell antitumor activity. In some embodiments, the targeting polypeptide binds CD47, SIRPa, CD31, CD24, SIGLEC10, or LILRB1.

[0024] In one embodiment, the fusion protein of the invention comprises a targeting polypeptide that specifically binds a T cell inhibitory receptor (TCIR), a T cell inhibitory receptor ligand (TCIR ligand), a T-cell co-inhibitory molecule, or a T cell co-stimulatory molecule.

[0025] In an additional aspect, the antibody is an antagonist of a TCIR, TCIR ligand, or T cell co-inhibitory molecule. In an additional aspect, the targeting moiety polypeptide specifically binds one or more of the following molecules: Cytotoxic T lymphocyte associated antigen-4 (CTLA-4, CD152), Programmed Death-1 protein (PD-1), Programmed death ligand-1 (PD-L1), Programmed death ligand (PD-L2), B7-H3 (CD276), T-cell immunoglobulin and mucin-domain containing-3 (TIM-3), Carcinoembryonic antigen-related cell adhesion molecule (CEACAM), V domain Ig suppressor of T cell activation (VISTA), V-set and immunoglobulin domain containing 8 (VSIG8), B and T lymphocyte attenuator (BTLA), Herpesvirus Entry Mediator (HVEM), CD160, T cell Ig and ITIM domain (TIGIT), PVRIG, CD226, CD96, Lymphocyte activation gene-3 (LAG-3).

[0026] In another aspect, the targeting polypeptide is an agonist of a T cell co-stimulatory molecule. In one aspect, the targeting polypeptide is an antibody that binds a T cell co-stimulatory molecule as an agonist. In another aspect, the targeting polypeptide is the extracellular domain of a native agonist ligand of a T cell co-stimulatory molecule. In an additional aspect, the targeting polypeptide specifically binds one of the following molecules: 4-1BB (CD137), Inducible T-Cell Costimulator (ICOS), OX-40 (CD134), Herpesvirus Entry Mediator (HVEM), glucocorticoid-induced TNFR-related protein (GITR), CD40, CD30, DNAM, or CD27.

[0027] In one embodiment, the fusion protein of the invention comprises a targeting polypeptide that specifically binds a cytokine or cytokine receptor. In a preferred embodiment, the cytokine/cytokine receptor interaction contributes to immune tolerance and/or promotion of tumor-promoting inflammation. In some embodiments, the cytokine or cytokine receptor are selected from the following: IL-17, IL-17R, IL-23, IL-23R, IL-6, IL-6R, IL-1, IL-1R, IL-10, IL-10R, TGFb, or TGFbR.

[0028] In one embodiment, the fusion protein of the invention comprises a targeting polypeptide that specifically binds a ectonucleotidase. In some embodiments, the ectonucleotidase is CD39 or CD73.

[0029] In one embodiment, the invention comprises fusion proteins comprising targeting polypeptides wherein the targeting polypeptide is an antibody fused to one or more ECDs. In one aspect, the targeting polypeptide is an antibody-drug conjugate (ADC). In one aspect, the antibody is conjugated to one or more cytotoxic agents. In some embodiments, the cytotoxic agent causes immunogenic cell death. In some embodiments, the cytotoxic agent causes genotoxic cell death.

[0030] The cytotoxic agent conjugated to the targeting polypeptide antibody may be any agent that induces cell death. In various embodiments, the cytotoxic agent may be selected from, but is not limited to, the following list: (1) maytansinoid (DM1), (2) calcheamicin, (3) auristatin (e.g., monomethyl auristatin E (MMAE) or monomethyl auristatin F (MMAF)).

[0031] In some embodiments, the cytotoxic agent may be conjugated to cysteines. In other embodiments, the cytotoxic agent may be conjugated to lysines. In some embodiments, the cytotoxic agent may be conjugated via a cleavable linker. In some embodiments, the cytotoxic agent may be conjugated via a non-cleavable linker. In various embodiments, the cytotoxic agent may be linked to the targeting polypeptide antibody via a linker, which may be selected from, but is not limited to, the following list: (1) hydrazone, (2) SMCC (maleimide), (3) valine-citrulline, (4) 4AP, (5) maleimidocaproyl (mc), (6) maleimidomethyl cyclohexane-1-carboxylate (mcc). The linker may further comprise one or more spacers. In some embodiments, the spacer may be selected from thiol-reactive maleimidocaproyl spacer and p-amino-benzyloxycarbonyl spacer. In one embodiment, the cleavable linker is maleimidocaproyl-valyl-citrullinyl-p-aminobenzyloxycarbonyl (mc-val-cit-PABC).

[0032] In one embodiment, a tumor-targeted antibody is fused to one or more receptor extracellular domains and conjugated to one or more cytotoxic agents. In one embodiment, a fusion protein comprises a targeting polypeptide wherein the targeting polypeptide is an antibody-drug conjugate and the targeting polypeptide is fused to a ligand-binding sequence of a receptor ECD. In one aspect, the receptor ECD is fused to the heavy chain of the targeting polypeptide. In another aspect, the receptor ECD is fused to the light chain of the targeting polypeptide.

[0033] In one embodiment, a fusion protein comprises a targeting polypeptide wherein the targeting polypeptide is an antibody-drug conjugate and the targeting polypeptide is fused to a ligand-binding sequence of TGFbRII ECD, or a fragment thereof. In one embodiment, a fusion protein comprises a targeting polypeptide wherein the targeting polypeptide is an antibody-drug conjugate and the targeting polypeptide is fused to a ligand-binding sequence of PD1 ECD, or a fragment thereof. In one embodiment, a fusion protein comprises a targeting polypeptide wherein the targeting polypeptide is an antibody-drug conjugate and the targeting polypeptide is fused to a ligand-binding sequence of BTLA ECD, or a fragment thereof. In one embodiment, a fusion protein comprises a targeting polypeptide wherein the targeting polypeptide is an antibody-drug conjugate and the targeting polypeptide is fused to a ligand-binding sequence of TIM-3 ECD, or a fragment thereof. In one embodiment, a fusion protein comprises a targeting polypeptide wherein the targeting polypeptide is an antibody-drug conjugate and the targeting polypeptide is fused to a ligand-binding sequence of SIRPa ECD, or a fragment thereof. In one embodiment, a fusion protein comprises a targeting polypeptide wherein the targeting polypeptide is an antibody-drug conjugate and the targeting polypeptide is fused to a ligand-binding sequence of SIGLEC10 ECD, or a fragment thereof. In one embodiment, a fusion protein comprises a targeting polypeptide wherein the targeting polypeptide is an antibody-drug conjugate and the targeting polypeptide is fused to a ligand-binding sequence of VEGFR ECD, or a fragment thereof.

[0034] In various embodiments, the targeting polypeptide is an antibody-drug conjugate selected from: gemtuzumab ozogamicin, brentuximab vedotin, trastuzumab emtansine, inotuzumab ozogamicin, polatuzumab vedotin, enfortumab vedotin, trastuzumab deruxtecan, or sacituzumab govitecan.

[0035] In one embodiment, the fusion protein comprises anti-nectin-4 antibody fused to TGFbRII on the C-terminus of the heavy chain; and MMAE is conjugated to the antibody via a protease cleavable linker comprising maleimidocaproyl, valine-citrulline, and PABC. In one aspect, this fusion protein is anti-nectin4-TGFbRII (e.g., SEQ ID NOs: 265, 160). In one embodiment, the fusion protein comprises anti-nectin-4 antibody fused to BTLA on the C-terminus of the heavy chain; and MMAE is conjugated to the antibody via a protease cleavable linker comprising maleimidocaproyl, valine-citrulline, and PABC. In one aspect, this fusion protein is anti-nectin4-BTLA (e.g., SEQ ID NOs: 256, 160). In one embodiment, the fusion protein comprises anti-nectin-4 antibody fused to SIRPa on the C-terminus of the heavy chain; and MMAE is conjugated to the antibody via a protease cleavable linker comprising maleimidocaproyl, valine-citrulline, and PABC. In one aspect, this fusion protein is anti-nectin4-SIRPa (e.g., SEQ ID NOs: 264, 160). In one embodiment, the fusion protein comprises anti-nectin-4 antibody fused to PD1 on the C-terminus of the heavy chain; and MMAE is conjugated to the antibody via a protease cleavable linker comprising maleimidocaproyl, valine-citrulline, and PABC. In one aspect, this fusion protein is anti-nectin4-PD1 (e.g., SEQ ID NOs: 261, 160). In one embodiment, the fusion protein comprises anti-nectin-4 antibody fused to TIM3 on the C-terminus of the heavy chain; and MMAE is conjugated to the antibody via a protease cleavable linker comprising maleimidocaproyl, valine-citrulline, and PABC. In one aspect, this fusion protein is anti-nectin4-TIM3 (e.g., SEQ ID NOs: 266, 160). In one embodiment, the fusion protein comprises anti-nectin-4 antibody fused to SIGLEC10 on the C-terminus of the heavy chain; and MMAE is conjugated to the antibody via a protease cleavable linker comprising maleimidocaproyl, valine-citrulline, and PABC. In one aspect, this fusion protein is anti-nectin4-SIGLEC10 (e.g., SEQ ID NOs: 263, 160).

[0036] In one embodiment, the fusion protein comprises anti-HER2 antibody fused to TGFbRII on the C-terminus of the heavy chain; and DM1 is conjugated to the antibody via a linker comprising mcc. In one aspect, this fusion protein is anti-HER2-TGFbRII (e.g., SEQ ID NOs: 253, 55). In one embodiment, the fusion protein comprises anti-HER2 antibody fused to BTLA on the C-terminus of the heavy chain; and DM1 is conjugated to the antibody via a linker comprising mcc. In one aspect, this fusion protein is anti-HER2-BTLA (e.g., SEQ ID NOs: 244, 55). In one embodiment, the fusion protein comprises anti-HER2 antibody fused to TIM-3 on the C-terminus of the heavy chain; and DM1 is conjugated to the antibody via a linker comprising mcc. In one aspect, this fusion protein is anti-HER2-TIM3 (e.g., SEQ ID NOs: 254, 55). In one embodiment, the fusion protein comprises anti-HER2 antibody fused to PD1 on the C-terminus of the heavy chain; and DM1 is conjugated to the antibody via a linker comprising mcc. In one aspect, this fusion protein is anti-HER2-PD1 (e.g., SEQ ID NOs: 249, 55). In one embodiment, the fusion protein comprises anti-HER2 antibody fused to SIRPa on the C-terminus of the heavy chain; and DM1 is conjugated to the antibody via a linker comprising mcc. In one aspect, this fusion protein is anti-HER2-SIRPa (e.g., SEQ ID NOs: 252, 55). In one embodiment, the fusion protein comprises anti-HER2 antibody fused to SIGLEC10 on the C-terminus of the heavy chain; and DM1 is conjugated to the antibody via a linker comprising mcc. In one aspect, this fusion protein is anti-HER2-SIGLEC10 (e.g., SEQ ID NOs: 251, 55). In one embodiment, the fusion protein comprises anti-HER2 antibody fused to VEGFR on the C-terminus of the heavy chain; and DM1 is conjugated to the antibody via a linker comprising mcc. In one aspect, this fusion protein is anti-HER2-VEGFR (e.g., SEQ ID NOs: 255, 55).

[0037] The targeting polypeptide may be an Fc-containing polypeptide, and the CH3 region of the Fc may end with a terminal lysine. In some embodiments, the terminal lysine of the CH3 region of the Fc may be removed.

[0038] The fusion proteins of the invention are designed to counteract the molecular determinants that contribute to key signatures of the tumor microenvironment. The targeting polypeptide and/or ECDs counteract one or more of the key receptor/ligand interactions that underlie the following signatures in the TME.

[0039] The first signature of the tumor microenvironment is immune tolerance, characterized by the following: (a) suppression of the differentiation, maturation, and function of macrophages/dendritic cells mediated by “don't-eat-me” signals (e.g., CD47/SIRPa, CD31/CD31, SIGLEC10/CD24, LILRB1/MHC), immuno-inhibitory cytokines (e.g., TGFb/TGFbR), immuno-inhibitory molecules that signal via SHP1/SHP2 (e.g., PD1/PDL1/PDL2); (b) inhibition of tumor-relative T cell maturation, activation, and function mediated by T cell co-inhibitory molecules (e.g., PD1/PDL1/PDL2, CTLA-4, LAG3, BTLA/HVEM, TIGIT/PVRIG, TIM3/CEACAM, VISTA/VSIG8), and immunosuppressive molecules involved in Treg differentiation and/or function (e.g., CTLA-4, TGFb, CD39, CD73, IL-10, HVEM).

[0040] The second signature of the tumor microenvironment is tumor promoting inflammation, characterized by the following (a) induction and maintenance of TH17 cells in the TME mediated by cytokine/cytokine receptor interactions (e.g., IL-6/IL-6R, IL-23/IL-23R, TGFb/TGFbR, IL-1/IL-1R), (b) TH17 function & TH17/tumor cell/endothelial cell crosstalk mediated by cytokine/cytokine receptor interactions (e.g., TGFb/TGFbR, IL-17/IL-17R, VEGF/VEGFR), (c) promotion of neoangiogenesis mediated by cytokine/cytokine receptor interactions (e.g., VEGF/VEGFR, TGFb/TGFbR, IL-17/IL-17).

[0041] In some embodiments, the fusion proteins of the invention are preferentially localized to a component of the tumor microenvironment. In one aspect, the fusion protein comprises a targeting polypeptide and this targeting polypeptide binds a component of the tumor microenvironment to localize the fusion protein. In a further aspect, the fusion protein comprises a targeting polypeptide and this targeting polypeptide binds to a tumor cell surface molecule, or tumor-infiltrating immune cell surface molecule, thereby localizing the fusion protein to the immediate microenvironment of the targeted tumor cell, tumor-associated endothelial cell, or tumor-infiltrating T cell (e.g., Treg or TH17). In another aspect, an ECD of the fusion protein binds a component of the tumor microenvironment to localize the fusion protein. In a further aspect, an ECD of the fusion protein binds to a tumor cell surface molecule, or tumor-infiltrating immune cell surface molecule, thereby localizing the fusion protein to the immediate microenvironment of the targeted tumor cell, tumor-associated endothelial cell, or tumor-infiltrating T cell (e.g., Treg or TH17).

[0042] In addition to localizing the fusion protein, in some embodiments, the targeting polypeptide additionally exerts a function by neutralizing a receptor/ligand interaction that aggravates immune tolerance or tumor promoting inflammation. In other embodiments, the targeting polypeptide exerts a function by neutralizing a growth factor, growth factor receptor, or other molecule that promotes tumor cell survival, growth, or metastases. In other embodiments, the targeting polypeptide serves as an agonist that binds a T cell co-stimulatory molecule.

[0043] In various embodiments, the fusion proteins of the invention counteract VEGF in the tumor microenvironment.

[0044] In some embodiments, the fusion proteins of the invention comprise a targeting polypeptide that binds VEGF or VEGFR fused to one or more receptor ECDs. These receptor ECDs are preferably selected from the following: PD1 ECD, TIM-3 ECD, TGFbRII ECD, BTLA ECD, SIRPa ECD, SIGLEC10 ECD. In some embodiments, the targeting polypeptide that binds VEGF or VEGFR is an antibody. Exemplary embodiments include anti-VEGF-TGFbR (e.g., SEQ ID NOs: 370, 32); anti-VEGF-BTLA (e.g., SEQ ID NOs: 361, 32); anti-VEGF-SIGLEC10 (e.g., SEQ ID NOs: 368, 32); anti-VEGF-PD1 (e.g., SEQ ID NOs: 366, 32); anti-VEGF-SIRPa (e.g., SEQ ID NOs: 369, 32); anti-VEGF-TIM3 (e.g., SEQ ID NOs: 371, 32). In another embodiment, the fusion protein comprises antibody that binds VEGF or VEGFR fused to one receptor ECD on heavy chain and another receptor ECD fused on light chain. Exemplary embodiments include anti-VEGF-SIRPa-SIGLEC10 (e.g., SEQ ID NOs: 369, 363); anti-VEGF-TIM3-BTLA (e.g., SEQ ID NOs: 371, 367); anti-VEGF-BTLA-SIGLEC10 (e.g., SEQ ID NOs: 361, 363); anti-VEGF-TGFbR-SIRPa (e.g., SEQ ID NOs: 370, 364); anti-VEGF-PD1-SIRPa (e.g., SEQ ID NOs: 366, 364); anti-VEGF-BTLA-TIM3 (e.g., SEQ ID NOs: 361, 365); anti-VEGF-TIM3-SIRPa (e.g., SEQ ID NOs: 371, 364); anti-VEGF-SIRPa-BTLA (e.g., SEQ ID NOs: 369, 367); anti-VEGF-SIRPa-TIM3 (e.g., SEQ ID NOs: 369, 365); anti-VEGF-TGFbR-SIGLEC10 (e.g., SEQ ID NOs: 370, 363); anti-VEGF-TGFbR-PD1 (e.g., SEQ ID NOs: 370, 362); anti-VEGF-PD1-SIGLEC10 (e.g., SEQ ID NOs: 366, 363); anti-VEGF-PD1-BTLA (e.g., SEQ ID NOs: 366, 367); anti-VEGF-TGFbR-TIM3 (e.g., SEQ ID NOs: 370, 365); anti-VEGF-SIGLEC10-BTLA (e.g., SEQ ID NOs: 368, 367); anti-VEGF-SIRPa-PD1 (e.g., SEQ ID NOs: 369, 362); anti-VEGF-BTLA-SIRPa (e.g., SEQ ID NOs: 361, 364); anti-VEGF-TGFbR-BTLA (e.g., SEQ ID NOs: 370, 367); anti-VEGF-TIM3-SIGLEC10 (e.g., SEQ ID NOs: 371, 363); anti-VEGF-SIGLEC10-TIM3 (e.g., SEQ ID NOs: 368, 365); anti-VEGF-PD1-TIM3 (e.g., SEQ ID NOs: 366, 365); anti-VEGF-TIM3-PD1 (e.g., SEQ ID NOs: 371, 362); anti-VEGF-SIGLEC10-SIRPa (e.g., SEQ ID NOs: 368, 364); anti-VEGF-BTLA-PD1 (e.g., SEQ ID NOs: 361, 362); anti-VEGF-SIGLEC10-PD1 (e.g., SEQ ID NOs: 368, 362).

[0045] In other embodiments, the fusion proteins comprise a ligand-binding sequence of an extracellular domain of VEGFR (e.g., VEGFR ECD). In one aspect, the VEGFR ECD comprises Ig domain 2 from VEGFR1, fused to Ig domain 3 from VEGFR2. In one embodiment, the fusion protein comprises amino acids 103-204 of VEGFR1 fused to amino acids 206-308 of VEGFR2. In one embodiment, the fusion protein comprises the same domains of VEGFR1 and VEGFR2 as aflibercept. In some embodiments, the VEGFR ECD may be selected from the following list: SEQ ID NOS: 184; 185; 186. In a preferred embodiment, if the targeting polypeptide is an antibody, the VEGFR ECD is fused to the C terminus of the heavy chain of the antibody.

[0046] In one aspect, the fusion proteins of the invention comprise an antibody that targets a tumor antigen or tumor-associated antigen expressed in the TME, wherein said antibody is fused to a VEGF-binding sequence from one or more extracellular domains of VEGFR (e.g. VEGFR1ECD and/or VEGFR2ECD). Exemplary embodiments include anti-HER2-VEGFR (e.g., SEQ ID NOs: 255, 55); anti-EGFRvIII-VEGFR (e.g., SEQ ID NOs: 243, 47); anti-EGFR-VEGFR (e.g., SEQ ID NOs: 231, 43); anti-nectin4-VEGFR (e.g., SEQ ID NOs: 267, 160).

[0047] In one aspect, the fusion proteins of the invention comprise an antibody with VEGFR fused to the heavy chain of the antibody and another receptor ECD fused to the light chain of the antibody. This additional receptor ECD may be selected from BTLA, PD1, SIGLEC10, SIRPa, TIM3. Exemplary embodiments include anti-HER2-VEGFR-PD1 (e.g., SEQ ID NOs: 255, 245); anti-HER2-VEGFR-SIRPa (e.g., SEQ ID NOs: 255, 247); anti-HER2-VEGFR-BTLA (e.g., SEQ ID NOs: 255, 250); anti-HER2-VEGFR-SIGLEC10 (e.g., SEQ ID NOs: 255, 246); anti-HER2-VEGFR-TIM3 (e.g., SEQ ID NOs: 255, 248); and anti-EGFRvIII-VEGFR-BTLA (e.g., SEQ ID NOs: 243, 238); anti-EGFRvIII-VEGFR-TIM3 (e.g., SEQ ID NOs: 243, 236); anti-EGFRvIII-VEGFR-SIGLEC10 (e.g., SEQ ID NOs: 243, 234); anti-EGFRvIII-VEGFR-PD1 (e.g., SEQ ID NOs: 243, 233); anti-EGFRvIII-VEGFR-SIRPa (e.g., SEQ ID NOs: 243, 235).

[0048] Antitumor efficacy of CD47 blockade may be limited by disruption of TSP-1/CD47-dependent inhibition of VEGF and angiogenesis. In one embodiment, the fusion protein is a polypeptide comprising an antibody that targets CD47, wherein said antibody is fused to a VEGFR ECD. In one embodiment, this fusion protein is anti-CD47-VEGFR (e.g., SEQ ID NOs: 392, 22). In another aspect, the fusion protein comprises a VEGF-binding sequence from VEGFR ECD and a CD47-binding sequence from one or more extracellular domains of SIRPa (SIRPa ECD). In one embodiment, this fusion protein comprises SIRPa ECD and VEGFR ECD. In one embodiment, this fusion protein is SIRPa-Fc-VEGFR (e.g., SEQ ID NO: 552) or VEGFR-Fc-SIRPa (e.g., SEQ ID NO: 568).

[0049] In a further aspect, the fusion protein comprises VEGFR ECD, a polypeptide that inhibits the interaction between CD47 and SIRPa, and another receptor ECD. In some embodiments, this fusion protein comprises anti-CD47 mAb with VEGFR ECD fused to the heavy chain; and the other ECD fused to the light chain. Exemplary embodiments are anti-CD47-VEGFR-TIM3 (e.g., SEQ ID NOs: 392, 386); anti-CD47-VEGFR-SIGLEC10 (e.g., SEQ ID NOs: 392, 385); anti-CD47-VEGFR-BTLA (e.g., SEQ ID NOs: 392, 388); anti-CD47-VEGFR-PD1 (e.g., SEQ ID NOs: 392, 384).

[0050] In a further embodiment, the fusion protein is a tumor-targeted antibody-drug conjugate fused to VEGFR ECD. For example, the fusion protein may comprise enfortumab vedotin fused to VEGFR ECD. In a further embodiment, the fusion protein is a bispecific antibody that simultaneously binds a tumor cell and a T cell, fused to VEGFR ECD. For example, the fusion protein may comprise CD3×EGFRvIII (e.g., AMG596) fused to VEGFR ECD or CD3×CEA (e.g., cibisatamab) fused to VEGFR ECD or CD3×HER2 (e.g., GBR1302, M802, RG6194) fused to VEGFR ECD.

[0051] In some embodiments, the fusion protein comprises VEGFR ECD and a polypeptide that inhibits TGFb/TGFbR signaling. In some embodiments, the fusion protein comprises VEGFR ECD and anti-TGFb mAb, anti-TGFbR mAb, anti-LAP mAb, or anti-GARP mAb. In a further embodiment, the fusion protein may additionally comprise a receptor ECD fused to the light chain of the antibody. In some embodiments, the fusion protein is selected from anti-TGFb-VEGFR-SIRPa (e.g., SEQ ID NOs: 403, 396); anti-TGFb-VEGFR-SIGLEC10 (e.g., SEQ ID NOs: 403, 395); anti-TGFb-VEGFR-BTLA (e.g., SEQ ID NOs: 403, 399); anti-TGFb-VEGFR-TIM3 (e.g., SEQ ID NOs: 403, 397); anti-TGFb-VEGFR-PD1 (e.g., SEQ ID NOs: 403, 394).

[0052] TH17 cells produce IL-17 which is a key determinant of resistance to VEGF blockade. Additionally, endothelial cells on which VEGF act express IL-17R that responds to TH17-produced IL-17. In some embodiments, the fusion protein comprises VEGFR ECD and an antibody that binds and disables IL-17/IL-17R, IL-23/IL-23R, or IL-6/IL-6R. In some embodiments, the fusion protein is selected from the following: anti-IL17-VEGFR, anti-IL17R-VEGFR (e.g., SEQ ID NOs: 336, 63), anti-IL23-VEGFR (e.g., SEQ ID NOs: 348, 75), anti-IL23R-VEGFR. In a further embodiment, the fusion protein comprises an additional receptor ECD selected from the following list: SIGLEC10 ECD, SIRPa ECD, BTLA ECD, PD1 ECD, TIM3 ECD.

[0053] In some embodiments, the fusion protein comprises VEGFR ECD and a targeting polypeptide that binds and disables a T cell co-inhibitory molecule. In some embodiments, the targeting polypeptide is an antibody. Exemplary embodiments include BTLA-Fc-VEGFR (e.g., SEQ ID NO: 534), PD1-Fc-VEGFR (e.g., SEQ ID NO: 540), TIM3-Fc-VEGFR (e.g., SEQ ID NO: 564), and anti-PDL1-VEGFR (e.g., SEQ ID NOs: 468, 109).

[0054] In some embodiments, the fusion protein comprises VEGFR ECD and an antibody that binds an ectonucleotidase. The ectonucleotidase is preferably CD39 or CD73. In a further embodiment, the fusion protein comprises an additional receptor ECD fused to the light chain of the antibody. Exemplary embodiments include anti-CD39-VEGFR-BTLA and anti-CD73-VEGFR-BTLA (e.g., SEQ ID NOs: 427, 422).

[0055] In one embodiment, the fusion protein comprises a polypeptide that binds a T cell co-stimulatory molecule and VEGFR ECD. In some embodiments, the fusion protein is a native T cell co-stimulatory molecule ECD fused to VEGFR (either N-costimulatory ECD-Fc-VEGFR ECD-C, or N-VEGFR ECD-Fc-costimulatory ECD-C). In some embodiments, this fusion protein is selected from: 41BBL-Fc-VEGFR (e.g., SEQ ID NO: 632); OX40L-Fc-VEGFR (e.g., SEQ ID NO: 646); ICOSL-Fc-VEGFR (e.g., SEQ ID NO: 642), VEGFR-Fc-41BBL (e.g., SEQ ID NO: 631); VEGFR-Fc-ICOSL (e.g., SEQ ID NO: 641); VEGFR-Fc-OX40L (e.g., SEQ ID NO: 645). In other embodiments, the fusion protein comprises an antibody or other polypeptide that binds a T cell co-stimulatory molecule fused to VEGFR. This antibody or polypeptide is preferably an agonist of the T cell co-stimulatory molecule. In some embodiments, this fusion protein is selected from: anti-OX40-VEGFR (e.g., SEQ ID NOs: 516, 97); anti-41BB-VEGFR (e.g., SEQ ID NOs: 504, 2); anti-ICOS-VEGFR (e.g., SEQ ID NOs: 528, 59).

[0056] In various embodiments, the fusion proteins of the invention counteract TGFb in the tumor microenvironment.

[0057] In some embodiments, the fusion proteins of the invention comprise a targeting polypeptide that binds TGFb, TGFbR, LAP, or GARP fused to one or more receptor ECDs. These receptor ECDs are preferably selected from the following: PD1 ECD, TIM-3 ECD, VEGFR ECD, BTLA ECD, SIRPa ECD, SIGLEC10 ECD. In some embodiments, the targeting polypeptide that binds TGFb, TGFbR, LAP, or GARP is an antibody. Exemplary embodiments include anti-TGFb-PD1 (e.g., SEQ ID NOs: 398, 133); anti-TGFb-SIRPa (e.g., SEQ ID NOs: 401, 133); anti-TGFb-TIM3 (e.g., SEQ ID NOs: 402, 133); anti-TGFb-SIGLEC10 (e.g., SEQ ID NOs: 400, 133); anti-TGFb-BTLA (e.g., SEQ ID NOs: 393, 133); anti-TGFb-VEGFR (e.g., SEQ ID NOs: 403, 133). In another embodiment, the fusion protein comprises antibody that binds TGFb, TGFbR, LAP, or GARP fused to one receptor ECD on heavy chain and another receptor ECD fused on light chain. Exemplary embodiments include anti-TGFb-SIRPa-BTLA (e.g., SEQ ID NOs: 401, 399); anti-TGFb-BTLA-TIM3 (e.g., SEQ ID NOs: 393, 397); anti-TGFb-PD1-BTLA (e.g., SEQ ID NOs: 398, 399); anti-TGFb-TIM3-SIGLEC10 (e.g., SEQ ID NOs: 402, 395); anti-TGFb-TIM3-BTLA (e.g., SEQ ID NOs: 402, 399); anti-TGFb-BTLA-SIGLEC10 (e.g., SEQ ID NOs: 393, 395); anti-TGFb-SIGLEC10-TIM3 (e.g., SEQ ID NOs: 400, 397); anti-TGFb-BTLA-PD1 (e.g., SEQ ID NOs: 393, 394); anti-TGFb-SIGLEC10-SIRPa (e.g., SEQ ID NOs: 400, 396); anti-TGFb-VEGFR-BTLA (e.g., SEQ ID NOs: 403, 399); anti-TGFb-PD1-TIM3 (e.g., SEQ ID NOs: 398, 397); anti-TGFb-BTLA-SIRPa (e.g., SEQ ID NOs: 393, 396); anti-TGFb-PD1-SIRPa (e.g., SEQ ID NOs: 398, 396); anti-TGFb-SIGLEC10-PD1 (e.g., SEQ ID NOs: 400, 394); anti-TGFb-SIRPa-TIM3 (e.g., SEQ ID NOs: 401, 397); anti-TGFb-SIRPa-PD1 (e.g., SEQ ID NOs: 401, 394); anti-TGFb-TIM3-PD1 (e.g., SEQ ID NOs: 402, 394); anti-TGFb-VEGFR-TIM3 (e.g., SEQ ID NOs: 403, 397); anti-TGFb-VEGFR-PD1 (e.g., SEQ ID NOs: 403, 394); anti-TGFb-TIM3-SIRPa (e.g., SEQ ID NOs: 402, 396); anti-TGFb-SIRPa-SIGLEC10 (e.g., SEQ ID NOs: 401, 395); anti-TGFb-VEGFR-SIGLEC10 (e.g., SEQ ID NOs: 403, 395); anti-TGFb-PD1-SIGLEC10 (e.g., SEQ ID NOs: 398, 395); anti-TGFb-VEGFR-SIRPa (e.g., SEQ ID NOs: 403, 396); anti-TGFb-SIGLEC10-BTLA (e.g., SEQ ID NOs: 400, 399).

[0058] In various embodiments, the fusion proteins of the invention counteract TGFb in the tumor microenvironment. In some embodiments, the fusion proteins comprise a ligand-binding sequence of an extracellular domain of TGFbR (e.g., TGFbRII ECD). In one embodiment, this ligand trap binds TGFb1, TGFb2, and/or TGFb3. In some embodiments, the TGFbR ECD may be a ligand-binding sequence of TGFbRII ECD. In some embodiments, the TGFbR ECD may be a fusion of domains from TGFbRII and TGFbRIII. In some embodiments, the TGFbR ECD may be selected from the following list: SEQ ID NOS: 177; 178; 179; 180

[0059] TGFb is known to interfere with phagocytosis and FcR-mediated cross-presentation. In some embodiments, the fusion protein comprises TGFbRII ECD and a polypeptide that inhibits the interaction between CD47 and SIRPa. In one embodiment, this fusion protein is anti-CD47 mAb fused to TGFbRII ECD (anti-CD47-TGFbRII (e.g., SEQ ID NOs: 390, 22)). In another embodiment, this fusion protein comprises SIRPa ECD and TGFbRII ECD. In one embodiment, this fusion protein is SIRPa-Fc-TGFbRII (e.g., SEQ ID NO: 550) or TGFbRII-Fc-SIRPa (e.g., SEQ ID NO: 556).

[0060] In other embodiments, the fusion protein comprises TGFbRII ECD, a polypeptide that inhibits the interaction between CD47 and SIRPa, and an additional receptor ECD selected from PD1 ECD, BTLA ECD, TIM-3 ECD, SIGLEC 10 ECD. Exemplary embodiments of this fusion protein include anti-CD47-TGFbRII-PD1 (e.g., SEQ ID NOs: 390, 384), anti-CD47-TGFbRII-BTLA (e.g., SEQ ID NOs: 390, 388) and anti-CD47-TGFbRII-TIM3 (e.g., SEQ ID NOs: 390, 386).

[0061] TGFb directly interferes with antibody-dependent cellular cytotoxicity (ADCC) mediated by tumor-targeted antibodies, and cross-presentation. In some embodiments, the fusion protein comprises a tumor-targeted antibody and TGFbRII ECD. In some embodiments, this tumor targeted-antibody binds a tumor growth factor or growth factor receptor. In other embodiments, this tumor targeted antibody binds a tumor cell surface molecule. Exemplary embodiments of this fusion protein include, for example, anti-EGFRvIII-TGFbRII (e.g., SEQ ID NOs: 241, 47), anti-uPAR-TGFbRII (e.g., SEQ ID NOs: 272, 162), anti-PSMA-TGFbRII (e.g., SEQ ID NOs: 279, 121), anti-nectin4-TGFbRII (e.g., SEQ ID NOs: 265, 160).

[0062] In other embodiments, the fusion protein comprises TGFbRII ECD, SIRPa ECD, and an antibody with a heavy chain and light chain. In one embodiment, the TGFbRII ECD is fused to the heavy chain of the antibody and the SIRPa ECD is fused to the light chain of the antibody. In other embodiments, the antibody of said fusion protein is a tumor-targeted antibody. In some embodiments, this tumor targeted-antibody binds a tumor growth factor or growth factor receptor. In other embodiments, this tumor targeted antibody binds a tumor cell surface molecule. Exemplary embodiments of this fusion protein include anti-EGFR-TGFbRII-SIRPa (e.g., SEQ ID NOs: 229, 223), anti-HER2-TGFbRII-SIRPa (e.g., SEQ ID NOs: 253, 247), anti-EGFRvIII-TGFbRII-SIRPa (e.g., SEQ ID NOs: 241, 235), anti-uPAR-TGFbRII-SIRPa, and anti-PSMA-TGFbRII-SIRPa. In a further embodiment, the fusion protein comprises a tumor-targeted antibody, TGFbRII fused to the heavy chain, and SIGLEC10 ECD fused to the light chain.

[0063] In a further embodiment, the fusion protein is a tumor-targeted antibody-drug conjugate fused to TGFbRII ECD. For example, the fusion protein may comprise enfortumab vedotin fused to TGFbRII ECD. In a further embodiment, the fusion protein is a bispecific antibody that simultaneously binds a tumor cell and a T cell, fused to TGFbRII ECD. For example, the fusion protein may comprise CD3×EGFRvIII (e.g., AMG596) fused to TGFbRII ECD or CD3×CEA (e.g., cibisatamab) fused to TGFbRII ECD or CD3×HER2 (e.g., GBR1302, M802, RG6194) fused to TGFbRII ECD.

[0064] In a further embodiment, the fusion protein comprises a tumor-targeted antibody, TGFbRII fused to the heavy chain, and an additional receptor ECD fused to the light chain of the antibody selected from one of the following: PD1 ECD, BTLA ECD, TIM-3 ECD. Exemplary embodiments of this fusion protein include anti-PSMA-TGFbRII-PD1, anti-PSMA-TGFbRII-BTLA, anti-nectin4-TGFbRII-PD1 (e.g., SEQ ID NOs: 265, 257), or anti-nectin4-TGFbRII-BTLA (e.g., SEQ ID NOs: 265, 262).

[0065] In some embodiments, the fusion protein comprises TGFbRII ECD and an antibody that binds and disables a T cell co-inhibitory molecule. Exemplary embodiments of the invention are anti-PVRIG-TGFbRII and anti-TIGIT-TGFbRII (e.g., SEQ ID NOs: 478, 139). In some embodiments, the fusion protein comprises TGFbRII ECD, an antibody that binds and disables a T cell co-inhibitory molecule, and an additional receptor ECD. In one aspect, the TGFbRII ECD is fused to the heavy chain of the antibody and the additional receptor ECD is fused to the light chain of the antibody. The T cell co-inhibitory molecule may be selected from the following: PD1, PDL1, CTLA4, TIGIT, TIM3. In other embodiments, the fusion protein comprises TGFbRII ECD and the ECD of a T cell co-inhibitory molecule, selected from BTLA ECD, TIM-3 ECD. Exemplary embodiments of the invention are anti-PDL1-TGFbRII-BTLA (e.g., SEQ ID NOs: 466, 464), anti-CTLA4-TGFbRII-BTLA (e.g., SEQ ID NOs: 444, 441), anti-PD1-TGFbRII-BTLA (e.g., SEQ ID NOs: 456, 453), and anti-TIGIT-TGFbRII-BTLA (e.g., SEQ ID NOs: 478, 475).

[0066] In some embodiments, the fusion protein comprises TGFbRII ECD and an antibody that binds an ectonucleotidase. The ectonucleotidase is preferably CD39 or CD73. In a further embodiment, the fusion protein comprises an additional receptor ECD fused to the light chain of the antibody. Exemplary embodiments include anti-CD39-TGFbRII-BTLA and anti-CD73-TGFbRII-BTLA (e.g., SEQ ID NOs: 425, 422).

[0067] In one embodiment, the fusion protein comprises a polypeptide that binds a T cell co-stimulatory molecule and TGFbRII ECD. In some embodiments, the fusion protein is a native T cell co-stimulatory molecule ECD fused to TGFbRII (either N-costimulatory ECD-Fc-TGFbRII ECD-C, or N-TGFbRII ECD-Fc-costimulatory ECD-C). In some embodiments, this fusion protein is selected from: 41BBL-Fc-TGFbRII (e.g., SEQ ID NO: 616); ICOSL-Fc-TGFbRII (e.g., SEQ ID NO: 626); OX40L-Fc-TGFbRII (e.g., SEQ ID NO: 630), TGFbRII-Fc-ICOSL (e.g., SEQ ID NO: 625); TGFbRII-Fc-OX40L (e.g., SEQ ID NO: 629); TGFbRII-Fc-41BBL (e.g., SEQ ID NO: 615). In other embodiments, the fusion protein comprises an antibody or other polypeptide that binds a T cell co-stimulatory molecule fused to TGFbRII. This antibody or polypeptide is preferably an agonist of the T cell co-stimulatory molecule. In some embodiments, this fusion protein is selected from: anti-ICOS-TGFbRII (e.g., SEQ ID NOs: 526, 59); anti-OX40-TGFbRII (e.g., SEQ ID NOs: 514, 97); anti-41BB-TGFbRII (e.g., SEQ ID NOs: 502, 2).

[0068] In a further aspect, the fusion protein comprises an antibody that binds a T cell-costimulatory molecule, TGFbRII ECD, and an additional receptor ECD. In one aspect, the TGFbRII ECD is fused to the heavy chain of the antibody and the additional receptor ECD is fused to the light chain of the antibody. In some embodiments, the additional receptor ECD is BTLA ECD, PD1 ECD, TIM3 ECD, SIGLEC10 ECD, or SIRPa ECD. Exemplary embodiments of the invention are anti-OX40-TGFbRII-PD1 (e.g., SEQ ID NOs: 514, 506); anti-OX40-TGFbRII-TIM3 (e.g., SEQ ID NOs: 514, 509); anti-OX40-TGFbRII-SIGLEC10 (e.g., SEQ ID NOs: 514, 507); anti-OX40-TGFbRII-BTLA (e.g., SEQ ID NOs: 514, 511); anti-OX40-TGFbRII-SIRPa (e.g., SEQ ID NOs: 514, 508).

[0069] In some embodiments, the fusion protein comprises TGFbRII ECD and a polypeptide that inhibits VEGF/VEGFR signaling. In some embodiments, the fusion protein comprises TGFbRII ECD and anti-VEGFR mAb. In a further embodiment, the fusion protein may additionally comprise a receptor ECD fused to the light chain of the antibody. In some embodiments, the fusion protein is selected from anti-VEGFR-TGFbRII-TIM3 (e.g., SEQ ID NOs: 381, 376); anti-VEGFR-TGFbRII-BTLA (e.g., SEQ ID NOs: 381, 378); anti-VEGFR-TGFbRII-SIGLEC10 (e.g., SEQ ID NOs: 381, 374); anti-VEGFR-TGFbRII-PD1 (e.g., SEQ ID NOs: 381, 373); anti-VEGFR-TGFbRII-SIRPa (e.g., SEQ ID NOs: 381, 375). In some embodiments, the fusion protein comprises TGFbRII ECD and anti-VEGF mAb. In a further embodiment, the fusion protein may additionally comprise a receptor ECD fused to the light chain of the antibody. In some embodiments, the fusion protein is selected from anti-VEGF-TGFbRII-TIM3 (e.g., SEQ ID NOs: 370, 365); anti-VEGF-TGFbRII-SIRPa (e.g., SEQ ID NOs: 370, 364); anti-VEGF-TGFbRII-PD1 (e.g., SEQ ID NOs: 370, 362); anti-VEGF-TGFbRII-BTLA (e.g., SEQ ID NOs: 370, 367); anti-VEGF-TGFbRII-SIGLEC10 (e.g., SEQ ID NOs: 370, 363). In other embodiments, the fusion protein comprises TGFbRII ECD and VEGFR ECD. In one embodiment, this fusion protein is TGFbRII-Fc-VEGFR (e.g., SEQ ID NO: 558). In another embodiment, this fusion protein is VEGFR-Fc-TGFbRII (e.g., SEQ ID NO: 569).

[0070] TGFb is a major determinant of TH17 differentiation and function, along with IL-17/IL-17R, IL-6/IL-6R, IL-23/IL-23R. In some embodiments, the fusion protein comprises TGFbRII ECD and an antibody that binds and disables IL-17/IL-17R, IL-23/IL-23R, or IL-6/IL-6R. In some embodiments, the fusion protein is selected from the following: anti-IL17-TGFbRII, anti-IL17R-TGFbRII (e.g., SEQ ID NOs: 334, 63), anti-IL23-TGFbRII (e.g., SEQ ID NOs: 346, 75), anti-IL23R-TGFbRII. In a further embodiment, the fusion protein comprises an additional receptor ECD selected from the following list: SIGLEC10 ECD, SIRPa ECD, BTLA ECD, PD1 ECD, TIM3 ECD.

[0071] In some embodiments, the fusion protein comprises TGFbRII ECD and an IL-15R binding fragment of IL-15, or an IL-12R binding fragment of IL-12. Exemplary embodiments include IL15-Fc-TGFbRII (e.g., SEQ ID NO: 590), TGFbRII-Fc-IL15 (e.g., SEQ ID NO: 589), IL12-Fc-TGFbRII (e.g., SEQ ID NO: 588) and TGFbRII-Fc-IL12 (e.g., SEQ ID NO: 587).

[0072] In various embodiments, the fusion proteins of the invention counteract PD1/PDL1 in the tumor microenvironment.

[0073] In various embodiments, the fusion protein comprises a ligand-binding sequence of an extracellular domain of PD1 (PD1 ECD). In some embodiments, the fusion protein comprises an antibody and PD1 ECD. In one embodiment, the PD1 ECD is fused to the heavy chain of the antibody. In another embodiment, the PD1 ECD is fused to the light chain of the antibody. In a preferred aspect, PD1 ECD is fused to C terminus of antibody heavy chain or light chain. In another aspect, PD1 ECD is fused to N terminus of antibody heavy chain or light chain.

[0074] In some embodiments, the fusion protein of the invention comprises a targeting polypeptide that is an antibody. In one embodiment, the antibody is fused to PD1 ECD and additional ligand traps selected from: TIM3 ECD, TGFbRII ECD, BTLA ECD, SIRPa ECD, VEGFR ECD, SIGLEC10 ECD.

[0075] In some embodiments, the fusion protein comprises PD1 ECD and a polypeptide that inhibits the interaction between CD47 and SIRPa. In one embodiment, this fusion protein is anti-CD47 mAb fused to PD1 ECD (e.g., anti-CD47-PD1 (e.g., SEQ ID NOs: 387, 22)). In another embodiment, this fusion protein comprises SIRPa ECD and PD1 ECD. In one embodiment, this fusion protein is SIRPa-Fc-PD1 (e.g., SEQ ID NO: 548) or PD1-Fc-SIRPa (e.g., SEQ ID NO: 537).

[0076] In a further aspect, the fusion protein comprises PD1 ECD, a polypeptide that inhibits the interaction between CD47 and SIRPa, and another polypeptide that inhibits a T cell co-inhibitory molecule. In some embodiments, this fusion protein comprises anti-CD47 mAb with PD1 ECD fused to the heavy chain or light chain; and the ECD of an immuno-inhibitory molecule fused to the other chain. In a preferred embodiment, the immuno-inhibitory molecule suppresses immune cells via ITIM/ITSMs. In a particular embodiment, this fusion protein is anti-CD47-PD1-TIM3 (e.g., SEQ ID NOs: 387, 386); anti-CD47-PD1-BTLA (e.g., SEQ ID NOs: 387, 388); anti-CD47-PD1-SIGLEC10 (e.g., SEQ ID NOs: 387, 385).

[0077] In another aspect, the fusion protein comprises PD1 ECD, anti-CD47 mAb, and VEGFR ECD. In some embodiments, VEGFR ECD is fused to heavy chain of anti-CD47 mAb and PD1 ECD is fused to light chain of anti-CD47 mAb. In one embodiment, this fusion protein is anti-CD47-VEGFR-PD1 (e.g., SEQ ID NOs: 392, 384).

[0078] In another aspect, the fusion protein comprises PD1 ECD, SIRPa ECD, and an targeting polypeptide that is an antibody with a heavy chain and light chain. In one aspect, the PD1 ECD is fused to the heavy chain of the antibody and the SIRPa ECD is fused to the light chain of the antibody. Exemplary embodiments include anti-CTLA4-PD1-SIRPa (e.g., SEQ ID NOs: 440, 438), anti-TIM3-PD1-SIRPa (e.g., SEQ ID NOs: 486, 484), anti-PDL1-PD1-SIRPa, anti-EGFR-PD1-SIRPa (e.g., SEQ ID NOs: 225, 223), anti-HER2-PD1-SIRPa (e.g., SEQ ID NOs: 249, 247), anti-EGFRvIII-PD1-SIRPa (e.g., SEQ ID NOs: 237, 235), anti-uPAR-PD1-SIRPa, anti-PSMA-PD1-SIRPa, anti-TGFb-PD1-SIRPa (e.g., SEQ ID NOs: 398, 396), anti-TGFbR-PD1-SIRPa, and anti-GARP-PD1-SIRPa, anti-VEGF-PD1-SIRPa (e.g., SEQ ID NOs: 366, 364), and anti-VEGFR-PD1-SIRPa (e.g., SEQ ID NOs: 377, 375).

[0079] In some embodiments, the fusion protein comprises PD1 ECD and a polypeptide that inhibits a T cell co-inhibitory molecule. In specific embodiments, the fusion protein comprises PD1 ECD and an antibody that binds and disables a T cell co-inhibitory molecule. Exemplary embodiments include anti-CTLA4-PD1 (e.g., SEQ ID NOs: 440, 28); anti-PD1-PD1 (e.g., SEQ ID NOs: 452, 101); anti-TIGIT-PD1 (e.g., SEQ ID NOs: 474, 139); anti-TIM3-PD1 (e.g., SEQ ID NOs: 486, 141). Additional exemplary embodiments are anti-PDL1 mAb fused to PD1 ECD where the anti-PDL1 mAb is atezolizumab (SEQ ID NOs: 108, 109); avelumab (SEQ ID NOs: 110, 111); durvalumab (SEQ ID NOs: 112, 113). In a further embodiment, the fusion protein may comprise an additional ECD of an immuno-inhibitory receptor selected from SIGLEC10 ECD, SIRPa ECD, TGFbRII ECD, TIM3 ECD, BTLA ECD, VEGFR ECD.

[0080] In some embodiments, the fusion protein comprises an antibody that binds a T cell co-stimulatory molecule fused to PD1. This antibody is preferably an agonist of the T cell co-stimulatory molecule. In some embodiments, this fusion protein is selected from: anti-ICOS-PD1 (e.g., SEQ ID NOs: 522, 59); anti-41BB-PD1 (e.g., SEQ ID NOs: 498, 2); anti-OX40-PD1 (e.g., SEQ ID NOs: 510, 97). In a further embodiment, the fusion protein may comprise an additional ECD of an immuno-inhibitory receptor selected from SIGLEC10 ECD, SIRPa ECD, TGFbRII ECD, TIM3 ECD, BTLA ECD, VEGFR ECD.

[0081] In one embodiment, the fusion protein comprises PD1 ECD and a polypeptide that binds either CD39 or CD73. In some embodiments, the fusion protein is an antibody that binds CD39 or CD73 fused to PD1 ECD; for example: anti-CD39-PD1 (e.g., SEQ ID NOs: 429, 18) or anti-CD73-PD1 (e.g., SEQ ID NOs: 421, 24). In some embodiments, the fusion protein comprises an additional receptor ECD fused to the antibody selected from [ECD]. In some embodiments, the fusion protein is selected from: anti-CD73-PD1-SIRPa (e.g., SEQ ID NOs: 421, 419); anti-CD73-PD1-BTLA (e.g., SEQ ID NOs: 421, 422); anti-CD73-PD1-TIM3 (e.g., SEQ ID NOs: 421, 420); anti-CD73-PD1-SIGLEC10 (e.g., SEQ ID NOs: 421, 418).

[0082] In some embodiments, the fusion protein comprises a tumor-targeted antibody and PD1 ECD. In some embodiments, this tumor targeted-antibody binds a tumor growth factor, growth factor receptor, or tumor cell surface molecule. In some embodiments, this fusion protein is selected from: anti-EGFR-PD1 (e.g., SEQ ID NOs: 225, 43), anti-HER2-PD1 (e.g., SEQ ID NOs: 249, 55), anti-EGFRvIII-PD1 (e.g., SEQ ID NOs: 237, 47), anti-uPAR-PD1 (e.g., SEQ ID NOs: 269, 162), anti-PSMA-PD1 (e.g., SEQ ID NOs: 276, 121), anti-nectin4-PD1 (e.g., SEQ ID NOs: 261, 160). In a further embodiment, the fusion protein may comprise an additional ECD of an immuno-inhibitory receptor selected from SIGLEC10 ECD, SIRPa ECD, TGFbRII ECD, TIM3 ECD, BTLA ECD, VEGFR ECD.

[0083] In some embodiments, the fusion protein comprises PD1 ECD and an antibody that binds and disables IL-17/IL-17R, IL-23/IL-23R, or IL-6/IL-6R. In some embodiments, the fusion protein is selected from: anti-IL17-PD1, anti-IL17R-PD1 (e.g., SEQ ID NOs: 330, 63), anti-IL23-PD1 (e.g., SEQ ID NOs: 342, 75), anti-IL23R-PD1, anti-IL6-PD1, anti-IL6R-PD1 (e.g., SEQ ID NOs: 318, 79). In a further embodiment, the fusion protein may comprise an additional ECD of an immuno-inhibitory receptor selected from SIGLEC10 ECD, SIRPa ECD, TGFbRII ECD, TIM3 ECD, BTLA ECD, VEGFR ECD.

[0084] In some embodiments, the fusion protein comprises PD1 ECD and an antibody that binds TGFb, TGFbR, or GARP. Exemplary embodiments of this fusion protein include anti-TGFb-PD1 (e.g., SEQ ID NOs: 398, 133), anti-TGFbR-PD1, and anti-GARP-PD1 (e.g., SEQ ID NOs: 411, 49). In some embodiments, the fusion protein further comprises an additional receptor ECD. Exemplary embodiments of this fusion protein include anti-TGFb-PD1-SIRPa (e.g., SEQ ID NOs: 398, 396); anti-TGFb-PD1-BTLA (e.g., SEQ ID NOs: 398, 399); anti-TGFb-PD1-SIGLEC10 (e.g., SEQ ID NOs: 398, 395); anti-TGFb-PD1-TIM3 (e.g., SEQ ID NOs: 398, 397).

[0085] In some embodiments, the fusion protein comprises PD1 ECD and IL-15. In some embodiments, the fusion protein is IL15-Fc-PD1 (e.g., SEQ ID NO: 578), PD1-Fc-IL15 (e.g., SEQ ID NO: 577), IL12-Fc-PD1 (e.g., SEQ ID NO: 576) or PD1-Fc-IL12 (e.g., SEQ ID NO: 575).

[0086] In some embodiments, the fusion proteins of the invention comprise a targeting polypeptide that binds PD1 or PDL1 fused to one or more receptor ECDs. These receptor ECDs are preferably selected from: TIM3 ECD, BTLA ECD, VEGFR ECD, TGFbRII ECD, SIRPa ECD, SIGLEC10 ECD. In some embodiments, the targeting polypeptide that binds PD1 or PDL1 is an antibody. Exemplary embodiments include anti-PD1-SIRPa (e.g., SEQ ID NOs: 455, 101); anti-PD1-VEGFR (e.g., SEQ ID NOs: 458, 101); anti-PD1-BTLA (e.g., SEQ ID NOs: 447, 101); anti-PD1-PD1 (e.g., SEQ ID NOs: 452, 101); anti-PD1-TIM3 (e.g., SEQ ID NOs: 457, 101); anti-PD1-SIGLEC10 (e.g., SEQ ID NOs: 454, 101); anti-PD1-TGFbR (e.g., SEQ ID NOs: 456, 101). In another embodiment, the fusion protein comprises antibody that binds PD1 or PDL1 fused to one receptor ECD on heavy chain and another receptor ECD fused on light chain.

[0087] In various embodiments, the fusion proteins of the invention counteract TIM3/CEACAM in the tumor microenvironment.

[0088] In various embodiments, the fusion protein comprises a ligand-binding sequence of an extracellular domain of TIM-3 (TIM3 ECD). In some embodiments, the fusion protein comprises an antibody and TIM3 ECD. In one embodiment, the TIM3 ECD is fused to the heavy chain of the antibody. In another embodiment, the TIM3 ECD is fused to the light chain of the antibody. In a preferred aspect, TIM3 ECD is fused to C terminus of antibody heavy chain or light chain. In another aspect, TIM3 ECD is fused to N terminus of antibody heavy chain or light chain.

[0089] In some embodiments, the fusion protein of the invention comprises a targeting polypeptide that is an antibody. In one embodiment, the antibody is fused to TIM3 ECD and additional ECDs selected from the following: PD1 ECD, TGFbRII ECD, BTLA ECD, SIRPa ECD, VEGFR ECD, SIGLEC10 ECD.

[0090] In some embodiments, the fusion protein comprises TIM3 ECD and a polypeptide that inhibits the interaction between CD47 and SIRPa. In one embodiment, this fusion protein is anti-CD47 mAb fused to TIM3 ECD (e.g., anti-CD47-TIM3 (e.g., SEQ ID NOs: 391, 22)). In another embodiment, this fusion protein comprises SIRPa ECD and TIM3 ECD. In one embodiment, this fusion protein is SIRPa-Fc-TIM3 (e.g., SEQ ID NO: 551) or TIM3-Fc-SIRPa (e.g., SEQ ID NO: 562).

[0091] In a further aspect, the fusion protein comprises TIM3 ECD, a polypeptide that inhibits the interaction between CD47 and SIRPa, and another polypeptide that inhibits a T cell co-inhibitory molecule. In some embodiments, this fusion protein comprises anti-CD47 mAb with TIM3 ECD fused to the heavy chain or light chain; and the ECD of an immuno-inhibitory molecule fused to the other chain. In a preferred embodiment, the immuno-inhibitory molecule suppresses immune cells via ITIM/ITSMs. In a particular embodiment, this fusion protein is anti-CD47-TIM3-SIGLEC10 (e.g., SEQ ID NOs: 391, 385); anti-CD47-TIM3-PD1 (e.g., SEQ ID NOs: 391, 384); anti-CD47-TIM3-BTLA (e.g., SEQ ID NOs: 391, 388).

[0092] In another aspect, the fusion protein comprises TIM3 ECD, anti-CD47 mAb, and VEGFR ECD. In some embodiments, VEGFR ECD is fused to heavy chain of anti-CD47 mAb and TIM3 ECD is fused to light chain of anti-CD47 mAb. In one embodiment, this fusion protein is anti-CD47-VEGFR-TIM3 (e.g., SEQ ID NOs: 392, 386).

[0093] In another aspect, the fusion protein comprises TIM3 ECD, SIRPa ECD, and a targeting polypeptide that is an antibody with a heavy chain and light chain. In one aspect, the TIM3 ECD is fused to the heavy chain of the antibody and the SIRPa ECD is fused to the light chain of the antibody. Exemplary embodiments include anti-CTLA4-TIM3-SIRPa (e.g., SEQ ID NOs: 445, 438), anti-PD1-TIM3-SIRPa (e.g., SEQ ID NOs: 457, 450), anti-PDL1-TIM3-SIRPa (e.g., SEQ ID NOs: 467, 461), anti-EGFR-TIM3-SIRPa (e.g., SEQ ID NOs: 230, 223), anti-HER2-TIM3-SIRPa (e.g., SEQ ID NOs: 254, 247), anti-EGFRvIII-TIM3-SIRPa (e.g., SEQ ID NOs: 242, 235), anti-uPAR-TIM3-SIRPa, anti-PSMA-TIM3-SIRPa, anti-TGFb-TIM3-SIRPa (e.g., SEQ ID NOs: 402, 396), anti-TGFbR-TIM3-SIRPa, and anti-GARP-TIM3-SIRPa, anti-VEGF-TIM3-SIRPa (e.g., SEQ ID NOs: 371, 364), and anti-VEGFR-TIM3-SIRPa (e.g., SEQ ID NOs: 382, 375).

[0094] In some embodiments, the fusion protein comprises TIM3 ECD and a polypeptide that inhibits a T cell co-inhibitory molecule. In specific embodiments, the fusion protein comprises TIM3 ECD and an antibody that binds and disables a T cell co-inhibitory molecule. Exemplary embodiments include anti-CTLA4-TIM3 (e.g., SEQ ID NOs: 445, 28); anti-TIM3-TIM3 (e.g., SEQ ID NOs: 491, 141); anti-PD1-TIM3 (e.g., SEQ ID NOs: 457, 101); anti-TIGIT-TIM3 (e.g., SEQ ID NOs: 479, 139); anti-PDL1-TIM3 (e.g., SEQ ID NOs: 467, 109). Additional exemplary embodiments are anti-PDL1 mAb fused to TIM3 ECD where the anti-PDL1 mAb is atezolizumab (SEQ ID NOs: 108, 109); avelumab (SEQ ID NOs: 110, 111); durvalumab (SEQ ID NOs: 112, 113). In a further embodiment, the fusion protein may comprise an additional ECD of an immuno-inhibitory receptor selected from SIGLEC10 ECD, SIRPa ECD, TGFbRII ECD, PD1 ECD, BTLA ECD, VEGFR ECD.

[0095] In some embodiments, the fusion protein comprises an antibody that binds a T cell co-stimulatory molecule fused to TIM3. This antibody is preferably an agonist of the T cell co-stimulatory molecule. In some embodiments, this fusion protein is selected from: anti-41BB-TIM3 (e.g., SEQ ID NOs: 503, 2); anti-OX40-TIM3 (e.g., SEQ ID NOs: 515, 97); anti-ICOS-TIM3 (e.g., SEQ ID NOs: 527, 59). In a further embodiment, the fusion protein may comprise an additional ECD of an immuno-inhibitory receptor selected from SIGLEC10 ECD, SIRPa ECD, TGFbRII ECD, PD1 ECD, BTLA ECD, VEGFR ECD.

[0096] In one embodiment, the fusion protein comprises TIM3 ECD and a polypeptide that binds either CD39 or CD73. In some embodiments, the fusion protein is an antibody that binds CD39 or CD73 fused to TIM3 ECD; for example: anti-CD39-TIM3 (e.g., SEQ ID NOs: 433, 18) or anti-CD73-TIM3 (e.g., SEQ ID NOs: 426, 24). In some embodiments, the fusion protein comprises an additional receptor ECD fused to the antibody selected from [ECD]. In some embodiments, the fusion protein is selected from the following: anti-CD73-TIM3-SIRPa (e.g., SEQ ID NOs: 426, 419); anti-CD73-TIM3-PD1 (e.g., SEQ ID NOs: 426, 417); anti-CD73-TIM3-SIGLEC10 (e.g., SEQ ID NOs: 426, 418); anti-CD73-TIM3-BTLA (e.g., SEQ ID NOs: 426, 422).

[0097] In some embodiments, the fusion protein comprises a tumor-targeted antibody and TIM3 ECD. In some embodiments, this tumor targeted-antibody binds a tumor growth factor, growth factor receptor, or tumor cell surface molecule. In some embodiments, this fusion protein is selected from the following: anti-EGFR-TIM3 (e.g., SEQ ID NOs: 230, 43), anti-HER2-TIM3 (e.g., SEQ ID NOs: 254, 55), anti-EGFRvIII-TIM3 (e.g., SEQ ID NOs: 242, 47), anti-uPAR-TIM3 (e.g., SEQ ID NOs: 273, 162), anti-PSMA-TIM3 (e.g., SEQ ID NOs: 280, 121), anti-nectin4-TIM3 (e.g., SEQ ID NOs: 266, 160). In a further embodiment, the fusion protein may comprise an additional ECD of an immuno-inhibitory receptor selected from SIGLEC10 ECD, SIRPa ECD, TGFbRII ECD, PD1 ECD, BTLA ECD, VEGFR ECD.

[0098] In some embodiments, the fusion protein comprises TIM3 ECD and an antibody that binds and disables IL-17/IL-17R, IL-23/IL-23R, or IL-6/IL-6R. In some embodiments, the fusion protein is selected from the following: anti-IL17-TIM3, anti-IL17R-TIM3 (e.g., SEQ ID NOs: 335, 63), anti-IL23-TIM3 (e.g., SEQ ID NOs: 347, 75), anti-IL23R-TIM3, anti-IL6-TIM3, anti-IL6R-TIM3 (e.g., SEQ ID NOs: 323, 79). In a further embodiment, the fusion protein may comprise an additional ECD of an immuno-inhibitory receptor selected from SIGLEC10 ECD, SIRPa ECD, TGFbRII ECD, PD1 ECD, BTLA ECD, VEGFR ECD.

[0099] In some embodiments, the fusion protein comprises TIM3 ECD and an antibody that binds TGFb, TGFbR, or GARP. Exemplary embodiments of this fusion protein include anti-TGFb-TIM3 (e.g., SEQ ID NOs: 402, 133), anti-TGFbR-TIM3, and anti-GARP-TIM3 (e.g., SEQ ID NOs: 414, 49). In some embodiments, the fusion protein further comprises an additional receptor ECD. Exemplary embodiments of this fusion protein include anti-TGFb-TIM3-SIGLEC10 (e.g., SEQ ID NOs: 402, 395); anti-TGFb-TIM3-BTLA (e.g., SEQ ID NOs: 402, 399); anti-TGFb-TIM3-PD1 (e.g., SEQ ID NOs: 402, 394); anti-TGFb-TIM3-SIRPa (e.g., SEQ ID NOs: 402, 396).

[0100] In some embodiments, the fusion protein comprises TIM3 ECD and IL-15. In some embodiments, the fusion protein is IL15-Fc-TIM3 (e.g., SEQ ID NO: 594), TIM3-Fc-IL15 (e.g., SEQ ID NO: 593), IL12-Fc-TIM3 (e.g., SEQ ID NO: 592) or TIM3-Fc-IL12 (e.g., SEQ ID NO: 591).

[0101] In some embodiments, the fusion proteins of the invention comprise a targeting polypeptide that binds TIM3 or CEACAM fused to one or more receptor ECDs. These receptor ECDs are preferably selected from the following: PD1 ECD, BTLA ECD, VEGFR ECD, TGFbRII ECD, SIRPa ECD, SIGLEC10 ECD. In some embodiments, the targeting polypeptide that binds TIM3 or CEACAM is an antibody. Exemplary embodiments include anti-TIM3-SIRPa (e.g., SEQ ID NOs: 489, 141); anti-TIM3-TGFbR (e.g., SEQ ID NOs: 490, 141); anti-TIM3-VEGFR (e.g., SEQ ID NOs: 492, 141); anti-TIM3-TIM3 (e.g., SEQ ID NOs: 491, 141); anti-TIM3-SIGLEC10 (e.g., SEQ ID NOs: 488, 141); anti-TIM3-BTLA (e.g., SEQ ID NOs: 481, 141); anti-TIM3-PD1 (e.g., SEQ ID NOs: 486, 141). In another embodiment, the fusion protein comprises antibody that binds TIM3 or CEACAM fused to one receptor ECD on heavy chain and another receptor ECD fused on light chain.

[0102] In various embodiments, the fusion proteins of the invention counteract BTLA/HVEM in the tumor microenvironment.

[0103] In various embodiments, the fusion protein comprises a ligand-binding sequence of an extracellular domain of B- and T-lymphocyte attenuator (BTLA ECD). In some embodiments, the fusion protein comprises an antibody and BTLA ECD. In one embodiment, the BTLA ECD is fused to the heavy chain of the antibody. In another embodiment, the BTLA ECD is fused to the light chain of the antibody. In a preferred aspect, BTLA ECD is fused to C terminus of antibody heavy chain or light chain. In another aspect, BTLA ECD is fused to N terminus of antibody heavy chain or light chain.

[0104] In some embodiments, the fusion protein of the invention comprises a targeting polypeptide that is an antibody. In one embodiment, the antibody is fused to BTLA ECD and additional ligand traps selected from the following: PD1 ECD, TGFbRII ECD, TIM3 ECD, SIRPa ECD, VEGFR ECD, SIGLEC10 ECD.

[0105] In some embodiments, the fusion protein comprises BTLA ECD and a polypeptide that inhibits the interaction between CD47 and SIRPa. In one embodiment, this fusion protein is anti-CD47 mAb fused to BTLA ECD (e.g., anti-CD47-BTLA (e.g., SEQ ID NOs: 383, 22)). In another embodiment, this fusion protein comprises SIRPa ECD and BTLA ECD. In one embodiment, this fusion protein is SIRPa-Fc-BTLA (e.g., SEQ ID NO: 547) or BTLA-Fc-SIRPa (e.g., SEQ ID NO: 531).

[0106] In a further aspect, the fusion protein comprises BTLA ECD, a polypeptide that inhibits the interaction between CD47 and SIRPa, and another polypeptide that inhibits a T cell co-inhibitory molecule. In some embodiments, this fusion protein comprises anti-CD47 mAb with BTLA ECD fused to the heavy chain or light chain; and the ECD of an immuno-inhibitory molecule fused to the other chain. In a preferred embodiment, the immuno-inhibitory molecule suppresses immune cells via ITIM/ITSMs. In a particular embodiment, this fusion protein is anti-CD47-BTLA-TIM3 (e.g., SEQ ID NOs: 383, 386); anti-CD47-BTLA-PD1 (e.g., SEQ ID NOs: 383, 384); anti-CD47-BTLA-SIGLEC10 (e.g., SEQ ID NOs: 383, 385).

[0107] In another aspect, the fusion protein comprises BTLA ECD, anti-CD47 mAb, and VEGFR ECD. In some embodiments, VEGFR ECD is fused to heavy chain of anti-CD47 mAb and BTLA ECD is fused to light chain of anti-CD47 mAb. In one embodiment, this fusion protein is anti-CD47-VEGFR-BTLA (e.g., SEQ ID NOs: 392, 388)

[0108] In another aspect, the fusion protein comprises BTLA ECD, SIRPa ECD, and an targeting polypeptide that is an antibody with a heavy chain and light chain. In one aspect, the BTLA ECD is fused to the heavy chain of the antibody and the SIRPa ECD is fused to the light chain of the antibody. Exemplary embodiments include anti-CTLA4-BTLA-SIRPa (e.g., SEQ ID NOs: 435, 438), anti-PD1-BTLA-SIRPa (e.g., SEQ ID NOs: 447, 450), anti-PDL1-BTLA-SIRPa (e.g., SEQ ID NOs: 459, 461), anti-EGFR-BTLA-SIRPa (e.g., SEQ ID NOs: 220, 223), anti-HER2-BTLA-SIRPa (e.g., SEQ ID NOs: 244, 247), anti-EGFRvIII-BTLA-SIRPa (e.g., SEQ ID NOs: 232, 235), anti-uPAR-BTLA-SIRPa, anti-PSMA-BTLA-SIRPa, anti-TGFb-BTLA-SIRPa (e.g., SEQ ID NOs: 393, 396), anti-TGFbR-BTLA-SIRPa, and anti-GARP-BTLA-SIRPa, anti-VEGF-BTLA-SIRPa (e.g., SEQ ID NOs: 361, 364), and anti-VEGFR-BTLA-SIRPa (e.g., SEQ ID NOs: 372, 375).

[0109] In some embodiments, the fusion protein comprises BTLA ECD and a polypeptide that inhibits a T cell co-inhibitory molecule. In specific embodiments, the fusion protein comprises BTLA ECD and an antibody that binds and disables a T cell co-inhibitory molecule. Exemplary embodiments include anti-PD1-BTLA (e.g., SEQ ID NOs: 447, 101); anti-PDL1-BTLA (e.g., SEQ ID NOs: 459, 109); anti-TIGIT-BTLA (e.g., SEQ ID NOs: 469, 139); anti-CTLA4-BTLA (e.g., SEQ ID NOs: 435, 28); anti-TIM3-BTLA (e.g., SEQ ID NOs: 481, 141). Additional exemplary embodiments are anti-PDL1 mAb fused to BTLA ECD where the anti-PDL1 mAb is atezolizumab (SEQ ID NOs: 108, 109); avelumab (SEQ ID NOs: 110, 111); durvalumab (SEQ ID NOs: 112, 113). In a further embodiment, the fusion protein may comprise an additional ECD of an immuno-inhibitory receptor selected from SIGLEC10 ECD, SIRPa ECD, TGFbRII ECD, PD1 ECD, TIM3 ECD, VEGFR ECD.

[0110] In some embodiments, the fusion protein comprises an antibody that binds a T cell co-stimulatory molecule fused to BTLA. This antibody is preferably an agonist of the T cell co-stimulatory molecule. In some embodiments, this fusion protein is selected from: anti-41BB-BTLA (e.g., SEQ ID NOs: 493, 2); anti-ICOS-BTLA (e.g., SEQ ID NOs: 517, 59); anti-OX40-BTLA (e.g., SEQ ID NOs: 505, 97). In a further embodiment, the fusion protein may comprise an additional ECD of an immuno-inhibitory receptor selected from SIGLEC10 ECD, SIRPa ECD, TGFbRII ECD, PD1 ECD, TIM3 ECD, VEGFR ECD.

[0111] In one embodiment, the fusion protein comprises BTLA ECD and a polypeptide that binds either CD39 or CD73. In some embodiments, the fusion protein is an antibody that binds CD39 or CD73 fused to BTLA ECD; for example: anti-CD39-BTLA (e.g., SEQ ID NOs: 428, 18) or anti-CD73-BTLA (e.g., SEQ ID NOs: 416, 24). In some embodiments, the fusion protein comprises an additional receptor ECD fused to the antibody selected from [ECD]. In some embodiments, the fusion protein is selected from the following: anti-CD73-BTLA-SIGLEC10 (e.g., SEQ ID NOs: 416, 418); anti-CD73-BTLA-SIRPa (e.g., SEQ ID NOs: 416, 419); anti-CD73-BTLA-TIM3 (e.g., SEQ ID NOs: 416, 420); anti-CD73-BTLA-PD1 (e.g., SEQ ID NOs: 416, 417).

[0112] In some embodiments, the fusion protein comprises a tumor-targeted antibody and BTLA ECD. In some embodiments, this tumor targeted-antibody binds a tumor growth factor, growth factor receptor, or tumor cell surface molecule. In some embodiments, this fusion protein is selected from the following: anti-EGFR-BTLA (e.g., SEQ ID NOs: 220, 43), anti-HER2-BTLA (e.g., SEQ ID NOs: 244, 55), anti-EGFRvIII-BTLA (e.g., SEQ ID NOs: 232, 47), anti-uPAR-BTLA (e.g., SEQ ID NOs: 268, 162), anti-PSMA-BTLA (e.g., SEQ ID NOs: 275, 121), anti-nectin4-BTLA (e.g., SEQ ID NOs: 256, 160). In a further embodiment, the fusion protein may comprise an additional ECD of an immuno-inhibitory receptor selected from SIGLEC10 ECD, SIRPa ECD, TGFbRII ECD, PD1 ECD, TIM3 ECD, VEGFR ECD.

[0113] In some embodiments, the fusion protein comprises BTLA ECD and an antibody that binds and disables IL-17/IL-17R, IL-23/IL-23R, or IL-6/IL-6R. In some embodiments, the fusion protein is selected from the following: anti-IL17-BTLA, anti-IL17R-BTLA (e.g., SEQ ID NOs: 325, 63), anti-IL23-BTLA (e.g., SEQ ID NOs: 337, 75), anti-IL23R-BTLA, anti-IL6-BTLA, anti-IL6R-BTLA (e.g., SEQ ID NOs: 313, 79). In a further embodiment, the fusion protein may comprise an additional ECD of an immuno-inhibitory receptor selected from SIGLEC10 ECD, SIRPa ECD, TGFbRII ECD, PD1 ECD, TIM3 ECD, VEGFR ECD.

[0114] In some embodiments, the fusion protein comprises BTLA ECD and an antibody that binds TGFb, TGFbR, or GARP. Exemplary embodiments of this fusion protein include anti-TGFb-BTLA (e.g., SEQ ID NOs: 393, 133), anti-TGFbR-BTLA, and anti-GARP-BTLA (e.g., SEQ ID NOs: 410, 49). In some embodiments, the fusion protein further comprises an additional receptor ECD. Exemplary embodiments of this fusion protein include anti-TGFb-BTLA-TIM3 (e.g., SEQ ID NOs: 393, 397); anti-TGFb-BTLA-PD1 (e.g., SEQ ID NOs: 393, 394); anti-TGFb-BTLA-SIRPa (e.g., SEQ ID NOs: 393, 396); anti-TGFb-BTLA-SIGLEC10 (e.g., SEQ ID NOs: 393, 395).

[0115] In some embodiments, the fusion protein comprises BTLA ECD and IL-15. In some embodiments, the fusion protein is IL15-Fc-BTLA (e.g., SEQ ID NO: 574), BTLA-Fc-IL15 (e.g., SEQ ID NO: 573), IL12-Fc-BTLA (e.g., SEQ ID NO: 572) or BTLA-Fc-IL12 (e.g., SEQ ID NO: 571).

[0116] In some embodiments, the fusion proteins of the invention comprise a targeting polypeptide that binds BTLA or HVEM fused to one or more receptor ECDs. These receptor ECDs are preferably selected from the following: PD1 ECD, TIM-3 ECD, VEGFR ECD, TGFbRII ECD, SIRPa ECD, SIGLEC10 ECD. In some embodiments, the targeting polypeptide that binds BTLA or HVEM is an antibody. In another embodiment, the fusion protein comprises antibody that binds BTLA or HVEM fused to one receptor ECD on heavy chain and another receptor ECD fused on light chain.

[0117] In various embodiments, the fusion proteins of the invention counteract SIRPa/CD47 in the tumor microenvironment.

[0118] In various embodiments, the fusion protein comprises a ligand-binding sequence of an extracellular domain of SIRPa (SIRPa ECD). In some embodiments, the fusion protein comprises an antibody and SIRPa ECD. In one embodiment, the SIRPa ECD is fused to the heavy chain of the antibody. In another embodiment, the SIRPa ECD is fused to the light chain of the antibody. In a preferred aspect, SIRPa ECD is fused to C terminus of antibody heavy chain or light chain. In another aspect, SIRPa ECD is fused to N terminus of antibody heavy chain or light chain.

[0119] In some embodiments, the fusion protein of the invention comprises a targeting polypeptide that is an antibody. In one embodiment, the antibody is fused to SIRPa ECD and additional ligand traps selected from the following: TIM3 ECD, TGFbRII ECD, BTLA ECD, PD1 ECD, VEGFR ECD, SIGLEC10 ECD.

[0120] In some embodiments, the fusion protein comprises SIRPa ECD and a polypeptide that inhibits a T cell co-inhibitory molecule. In specific embodiments, the fusion protein comprises SIRPa ECD and an antibody that binds and disables a T cell co-inhibitory molecule. Exemplary embodiments include anti-PD1-SIRPa (e.g., SEQ ID NOs: 455, 101); anti-TIM3-SIRPa (e.g., SEQ ID NOs: 489, 141); anti-CTLA4-SIRPa (e.g., SEQ ID NOs: 443, 28); anti-TIGIT-SIRPa (e.g., SEQ ID NOs: 477, 139); anti-PDL1-SIRPa (e.g., SEQ ID NOs: 465, 109). Additional exemplary embodiments are anti-PDL1 mAb fused to SIRPa ECD where the anti-PDL1 mAb is atezolizumab (SEQ ID NOs: 108, 109); avelumab (SEQ ID NOs: 110, 111); durvalumab (SEQ ID NOs: 112, 113). In a further embodiment, the fusion protein may comprise an additional ECD of an immuno-inhibitory receptor selected from SIGLEC10 ECD, PD1 ECD, TGFbRII ECD, TIM3 ECD, BTLA ECD, VEGFR ECD.

[0121] In some embodiments, the fusion protein comprises an antibody that binds a T cell co-stimulatory molecule fused to SIRPa. This antibody is preferably an agonist of the T cell co-stimulatory molecule. In some embodiments, this fusion protein is selected from: anti-ICOS-SIRPa (e.g., SEQ ID NOs: 525, 59); anti-OX40-SIRPa (e.g., SEQ ID NOs: 513, 97); anti-41BB-SIRPa (e.g., SEQ ID NOs: 501, 2). In a further embodiment, the fusion protein may comprise an additional ECD of an immuno-inhibitory receptor selected from SIGLEC10 ECD, PD1 ECD, TGFbRII ECD, TIM3 ECD, BTLA ECD, VEGFR ECD.

[0122] In one embodiment, the fusion protein comprises SIRPa ECD and a polypeptide that binds either CD39 or CD73. In some embodiments, the fusion protein is an antibody that binds CD39 or CD73 fused to SIRPa ECD; for example: anti-CD39-SIRPa (e.g., SEQ ID NOs: 431, 18) or anti-CD73-SIRPa (e.g., SEQ ID NOs: 424, 24). In some embodiments, the fusion protein comprises an additional receptor ECD fused to the antibody selected from [ECD]. In some embodiments, the fusion protein is selected from the following: anti-CD73-SIRPa-BTLA (e.g., SEQ ID NOs: 424, 422); anti-CD73-SIRPa-PD1 (e.g., SEQ ID NOs: 424, 417); anti-CD73-SIRPa-SIGLEC10 (e.g., SEQ ID NOs: 424, 418); anti-CD73-SIRPa-TIM3 (e.g., SEQ ID NOs: 424, 420).

[0123] In some embodiments, the fusion protein comprises a tumor-targeted antibody and SIRPa ECD. In some embodiments, this tumor targeted-antibody binds a tumor growth factor, growth factor receptor, or tumor cell surface molecule. In some embodiments, this fusion protein is selected from the following: anti-EGFR-SIRPa (e.g., SEQ ID NOs: 228, 43), anti-HER2-SIRPa (e.g., SEQ ID NOs: 252, 55), anti-EGFRvIII-SIRPa (e.g., SEQ ID NOs: 240, 47), anti-uPAR-SIRPa (e.g., SEQ ID NOs: 271, 162), anti-PSMA-SIRPa (e.g., SEQ ID NOs: 278, 121), anti-nectin4-SIRPa (e.g., SEQ ID NOs: 264, 160). In a further embodiment, the fusion protein may comprise an additional ECD of an immuno-inhibitory receptor selected from SIGLEC10 ECD, PD1 ECD, TGFbRII ECD, TIM3 ECD, BTLA ECD, VEGFR ECD.

[0124] In some embodiments, the fusion protein comprises SIRPa ECD and an antibody that binds and disables IL-17/IL-17R, IL-23/IL-23R, or IL-6/IL-6R. In some embodiments, the fusion protein is selected from the following: anti-IL17-SIRPa, anti-IL17R-SIRPa (e.g., SEQ ID NOs: 333, 63), anti-IL23-SIRPa (e.g., SEQ ID NOs: 345, 75), anti-IL23R-SIRPa, anti-IL6-SIRPa, anti-IL6R-SIRPa (e.g., SEQ ID NOs: 321, 79). In a further embodiment, the fusion protein may comprise an additional ECD of an immuno-inhibitory receptor selected from SIGLEC10 ECD, PD1 ECD, TGFbRII ECD, TIM3 ECD, BTLA ECD, VEGFR ECD.

[0125] In some embodiments, the fusion protein comprises SIRPa ECD and an antibody that binds TGFb, TGFbR, or GARP. Exemplary embodiments of this fusion protein include anti-TGFb-SIRPa (e.g., SEQ ID NOs: 401, 133), anti-TGFbR-SIRPa, and anti-GARP-SIRPa (e.g., SEQ ID NOs: 413, 49). In some embodiments, the fusion protein further comprises an additional receptor ECD. Exemplary embodiments of this fusion protein include anti-TGFb-SIRPa-BTLA (e.g., SEQ ID NOs: 401, 399); anti-TGFb-SIRPa-TIM3 (e.g., SEQ ID NOs: 401, 397); anti-TGFb-SIRPa-PD1 (e.g., SEQ ID NOs: 401, 394); anti-TGFb-SIRPa-SIGLEC10 (e.g., SEQ ID NOs: 401, 395).

[0126] In some embodiments, the fusion protein comprises SIRPa ECD and IL-15. In some embodiments, the fusion protein is IL15-Fc-SIRPa (e.g., SEQ ID NO: 586), SIRPa-Fc-IL15 (e.g., SEQ ID NO: 585), IL12-Fc-SIRPa (e.g., SEQ ID NO: 584) or SIRPa-Fc-IL12 (e.g., SEQ ID NO: 583).

[0127] In some embodiments, the fusion proteins of the invention comprise a targeting polypeptide that binds SIRPa or CD47 fused to one or more receptor ECDs. These receptor ECDs are preferably selected from the following: TIM3 ECD, BTLA ECD, VEGFR ECD, TGFbRII ECD, PD1 ECD, SIGLEC10 ECD. In some embodiments, the targeting polypeptide that binds SIRPa or CD47 is an antibody. Exemplary embodiments include anti-CD47-TGFbR (e.g., SEQ ID NOs: 390, 22); anti-CD47-SIGLEC10 (e.g., SEQ ID NOs: 389, 22); anti-CD47-VEGFR (e.g., SEQ ID NOs: 392, 22); anti-CD47-BTLA (e.g., SEQ ID NOs: 383, 22); anti-CD47-PD1 (e.g., SEQ ID NOs: 387, 22); anti-CD47-TIM3 (e.g., SEQ ID NOs: 391, 22). In another embodiment, the fusion protein comprises antibody that binds SIRPa or CD47 fused to one receptor ECD on heavy chain and another receptor ECD fused on light chain.

[0128] In various embodiments, the fusion proteins of the invention counteract SIGLEC10/CD24 in the tumor microenvironment.

[0129] In various embodiments, the fusion protein comprises a ligand-binding sequence of an extracellular domain of SIGLEC10 (SIGLEC10 ECD). In some embodiments, the fusion protein comprises an antibody and SIGLEC10 ECD. In one embodiment, the SIGLEC10 ECD is fused to the heavy chain of the antibody. In another embodiment, the SIGLEC10 ECD is fused to the light chain of the antibody. In a preferred aspect, SIGLEC10 ECD is fused to C terminus of antibody heavy chain or light chain. In another aspect, SIGLEC10 ECD is fused to N terminus of antibody heavy chain or light chain.

[0130] In some embodiments, the fusion protein of the invention comprises a targeting polypeptide that is an antibody. In one embodiment, the antibody is fused to SIGLEC10 ECD and additional ligand traps selected from the following: TIM3 ECD, TGFbRII ECD, BTLA ECD, PD1 ECD, VEGFR ECD, SIRPa ECD.

[0131] In some embodiments, the fusion protein comprises SIGLEC10 ECD and a polypeptide that inhibits the interaction between CD47 and SIRPa. In one embodiment, this fusion protein is anti-CD47 mAb fused to SIGLEC10 ECD (e.g., anti-CD47-SIGLEC10 (e.g., SEQ ID NOs: 389, 22)). In another embodiment, this fusion protein comprises SIRPa ECD and SIGLEC10 ECD. In one embodiment, this fusion protein is SIRPa-Fc-SIGLEC10 (e.g., SEQ ID NO: 549) or SIGLEC10-Fc-SIRPa (e.g., SEQ ID NO: 543).

[0132] In a further aspect, the fusion protein comprises SIGLEC10 ECD, a polypeptide that inhibits the interaction between CD47 and SIRPa, and another polypeptide that inhibits a T cell co-inhibitory molecule. In some embodiments, this fusion protein comprises anti-CD47 mAb with SIGLEC10 ECD fused to the heavy chain or light chain; and the ECD of an immuno-inhibitory molecule fused to the other chain. In a preferred embodiment, the immuno-inhibitory molecule suppresses immune cells via ITIM/ITSMs. In a particular embodiment, this fusion protein is anti-CD47-SIGLEC10-TIM3 (e.g., SEQ ID NOs: 389, 386); anti-CD47-SIGLEC10-BTLA (e.g., SEQ ID NOs: 389, 388).

[0133] In another aspect, the fusion protein comprises SIGLEC10 ECD, anti-CD47 mAb, and VEGFR ECD. In some embodiments, VEGFR ECD is fused to heavy chain of anti-CD47 mAb and SIGLEC10 ECD is fused to light chain of anti-CD47 mAb. In one embodiment, this fusion protein is anti-CD47-VEGFR-SIGLEC10 (e.g., SEQ ID NOs: 392, 385).

[0134] In another aspect, the fusion protein comprises SIGLEC10 ECD, PD1 ECD, and an targeting polypeptide that is an antibody with a heavy chain and light chain. In one aspect, the SIGLEC10 ECD is fused to the heavy chain of the antibody and the PD1 ECD is fused to the light chain of the antibody. Exemplary embodiments include anti-CTLA4-SIGLEC10-PD1 (e.g., SEQ ID NOs: 442, 436), anti-TIM3-SIGLEC10-PD1 (e.g., SEQ ID NOs: 488, 482), anti-PDL1-SIGLEC10-PD1, anti-EGFR-SIGLEC10-PD1 (e.g., SEQ ID NOs: 227, 221), anti-HER2-SIGLEC10-PD1 (e.g., SEQ ID NOs: 251, 245), anti-EGFRvIII-SIGLEC10-PD1 (e.g., SEQ ID NOs: 239, 233), anti-uPAR-SIGLEC10-PD1, anti-PSMA-SIGLEC10-PD1, anti-TGFb-SIGLEC10-PD1 (e.g., SEQ ID NOs: 400, 394), anti-TGFbR-SIGLEC10-PD1, and anti-GARP-SIGLEC10-PD1, anti-VEGF-SIGLEC10-PD1 (e.g., SEQ ID NOs: 368, 362), and anti-VEGFR-SIGLEC10-PD1 (e.g., SEQ ID NOs: 379, 373).

[0135] In some embodiments, the fusion protein comprises SIGLEC10 ECD and a polypeptide that inhibits a T cell co-inhibitory molecule. In specific embodiments, the fusion protein comprises SIGLEC10 ECD and an antibody that binds and disables a T cell co-inhibitory molecule. Exemplary embodiments include anti-PDL1-SIGLEC10 (e.g., SEQ ID NOs: 463, 109); anti-TIM3-SIGLEC10 (e.g., SEQ ID NOs: 488, 141); anti-PD1-SIGLEC10 (e.g., SEQ ID NOs: 454, 101); anti-CTLA4-SIGLEC10 (e.g., SEQ ID NOs: 442, 28); anti-TIGIT-SIGLEC10 (e.g., SEQ ID NOs: 476, 139). Additional exemplary embodiments are anti-PDL1 mAb fused to SIGLEC10 ECD where the anti-PDL1 mAb is atezolizumab (SEQ ID NOs: 108, 109); avelumab (SEQ ID NOs: 110, 111); durvalumab (SEQ ID NOs: 112, 113). In a further embodiment, the fusion protein may comprise an additional ECD of an immuno-inhibitory receptor selected from SIRPa ECD, PD1 ECD, TGFbRII ECD, TIM3 ECD, BTLA ECD, VEGFR ECD.

[0136] In some embodiments, the fusion protein comprises an antibody that binds a T cell co-stimulatory molecule fused to SIGLEC10. This antibody is preferably an agonist of the T cell co-stimulatory molecule. In some embodiments, this fusion protein is selected from: anti-41BB-SIGLEC10 (e.g., SEQ ID NOs: 500, 2); anti-OX40-SIGLEC10 (e.g., SEQ ID NOs: 512, 97); anti-ICOS-SIGLEC10 (e.g., SEQ ID NOs: 524, 59). In a further embodiment, the fusion protein may comprise an additional ECD of an immuno-inhibitory receptor selected from SIRPa ECD, PD1 ECD, TGFbRII ECD, TIM3 ECD, BTLA ECD, VEGFR ECD.

[0137] In one embodiment, the fusion protein comprises SIGLEC10 ECD and a polypeptide that binds either CD39 or CD73. In some embodiments, the fusion protein is an antibody that binds CD39 or CD73 fused to SIGLEC10 ECD; for example: anti-CD39-SIGLEC10 (e.g., SEQ ID NOs: 430, 18) or anti-CD73-SIGLEC10 (e.g., SEQ ID NOs: 423, 24). In some embodiments, the fusion protein comprises an additional receptor ECD fused to the antibody selected from [ECD]. In some embodiments, the fusion protein is selected from the following: anti-CD73-SIGLEC10-PD1 (e.g., SEQ ID NOs: 423, 417); anti-CD73-SIGLEC10-TIM3 (e.g., SEQ ID NOs: 423, 420); anti-CD73-SIGLEC10-SIRPa (e.g., SEQ ID NOs: 423, 419); anti-CD73-SIGLEC10-BTLA (e.g., SEQ ID NOs: 423, 422).

[0138] In some embodiments, the fusion protein comprises a tumor-targeted antibody and SIGLEC10 ECD. In some embodiments, this tumor targeted-antibody binds a tumor growth factor, growth factor receptor, or tumor cell surface molecule. In some embodiments, this fusion protein is selected from the following: anti-EGFR-SIGLEC10 (e.g., SEQ ID NOs: 227, 43), anti-HER2-SIGLEC10 (e.g., SEQ ID NOs: 251, 55), anti-EGFRvIII-SIGLEC10 (e.g., SEQ ID NOs: 239, 47), anti-uPAR-SIGLEC10 (e.g., SEQ ID NOs: 270, 162), anti-PSMA-SIGLEC10 (e.g., SEQ ID NOs: 277, 121), anti-nectin4-SIGLEC10 (e.g., SEQ ID NOs: 263, 160). In a further embodiment, the fusion protein may comprise an additional ECD of an immuno-inhibitory receptor selected from SIRPa ECD, PD1 ECD, TGFbRII ECD, TIM3 ECD, BTLA ECD, VEGFR ECD.

[0139] In some embodiments, the fusion protein comprises SIGLEC10 ECD and an antibody that binds IL-17/IL-17R, IL-23/IL-23R, or IL-6/IL-6R. In a preferred embodiment, the antibody interrupts the interaction between the ligand and receptor. In some embodiments, the fusion protein is selected from the following: anti-IL17-SIGLEC10, anti-IL17R-SIGLEC10 (e.g., SEQ ID NOs: 332, 63), anti-IL23-SIGLEC10 (e.g., SEQ ID NOs: 344, 75), anti-IL23R-SIGLEC10, anti-IL6-SIGLEC10, anti-IL6R-SIGLEC10 (e.g., SEQ ID NOs: 320, 79). In a further embodiment, the fusion protein may comprise an additional ECD of an immuno-inhibitory receptor selected from SIRPa ECD, PD1 ECD, TGFbRII ECD, TIM3 ECD, BTLA ECD, VEGFR ECD.

[0140] In some embodiments, the fusion protein comprises SIGLEC10 ECD and an antibody that binds TGFb, TGFbR, or GARP. Exemplary embodiments of this fusion protein include anti-TGFb-SIGLEC10 (e.g., SEQ ID NOs: 400, 133), anti-TGFbR-SIGLEC10, and anti-GARP-SIGLEC10 (e.g., SEQ ID NOs: 412, 49). In some embodiments, the fusion protein further comprises an additional receptor ECD. Exemplary embodiments of this fusion protein include anti-TGFb-SIGLEC10-TIM3 (e.g., SEQ ID NOs: 400, 397); anti-TGFb-SIGLEC10-PD1 (e.g., SEQ ID NOs: 400, 394); anti-TGFb-SIGLEC10-SIRPa (e.g., SEQ ID NOs: 400, 396); anti-TGFb-SIGLEC10-BTLA (e.g., SEQ ID NOs: 400, 399).

[0141] In some embodiments, the fusion protein comprises SIGLEC10 ECD and IL-15 ECD or IL-12 ECD. In some embodiments, the fusion protein is IL15-Fc-SIGLEC10 (e.g., SEQ ID NO: 582), SIGLEC10-Fc-IL15 (e.g., SEQ ID NO: 581), IL12-Fc-SIGLEC10 (e.g., SEQ ID NO: 580) or SIGLEC10-Fc-IL12 (e.g., SEQ ID NO: 579).

[0142] In some embodiments, the fusion proteins of the invention comprise a targeting polypeptide that binds SIGLEC10 or CD47 fused to one or more receptor ECDs. These receptor ECDs are preferably selected from the following: TIM3 ECD, BTLA ECD, VEGFR ECD, TGFbRII ECD, PD1 ECD, SIRPa ECD. In some embodiments, the targeting polypeptide that binds SIGLEC10 or CD47 is an antibody. Exemplary embodiments include anti-CD47-TGFbR (e.g., SEQ ID NOs: 390, 22); anti-CD47-SIGLEC10 (e.g., SEQ ID NOs: 389, 22); anti-CD47-VEGFR (e.g., SEQ ID NOs: 392, 22); anti-CD47-BTLA (e.g., SEQ ID NOs: 383, 22); anti-CD47-PD1 (e.g., SEQ ID NOs: 387, 22); anti-CD47-TIM3 (e.g., SEQ ID NOs: 391, 22). In another embodiment, the fusion protein comprises antibody that binds SIGLEC10 or CD47 fused to one receptor ECD on heavy chain and another receptor ECD fused on light chain.

[0143] In one embodiment the present invention provides methods of treating cancer by administering agent(s) that counteract multiple ligand/receptor interactions that promote tumor angiogenesis and/or immune dysfunction in the tumor microenvironment (TME).

[0144] The molecules of the invention may be used for the treatment of cancer. Further, the molecules of the invention may be used in conjunction or in combination with any other type of therapy including surgery, chemotherapy, radiation therapy, targeted small molecules, anti-angiogenic therapy or immunotherapy. Immunotherapy may include any immuno-oncologic drug selected from a broad range of agents, including antibodies, vaccines, adjuvant therapies, cytokines, oncolytic viruses, bispecific molecules, and cellular therapies. In a specific embodiment, the molecules of the invention may be administered to a subject in combination with (Chimeric Antigen Receptor (CAR) T cell therapy. In various aspects, the molecules of the invention may be administered in combination with one or more different molecules of the invention. In various aspects, the molecules of the invention may be administered prior to, concurrently, sequentially, and/or following another therapy. In various aspects, the molecules of the invention may be administered in a composition with any other therapeutic agent or molecule of the invention.

[0145] In some embodiments, molecules of the invention alone or in combination with other therapies counteract immune tolerance in the tumor microenvironment. In some embodiments, molecules of the invention alone or in combination with other therapies counteract angiogenesis in the tumor microenvironment.

[0146] In various embodiments, a subject may be administered one or more molecules from one or more of the following types of fusion proteins of the invention: fusion protein comprising an anti-VEGF antibody or anti-VEGFR antibody or VEGF-binding sequence of VEGFR ECD; fusion protein comprising anti-TGFb antibody or TGFb-binding sequence of TGFbR ECD; fusion protein comprising anti-PD1 antibody or anti-PDL1 antibody or PD1-binding sequence of PD1 ECD; fusion protein comprising anti-BTLA antibody or anti-HVEM antibody or HVEM-binding sequence of BTLA ECD; fusion protein comprising anti-CEACAM antibody or anti-TIM3 antibody or CEACAM-binding sequence of TIM3 ECD; fusion protein comprising anti-CD47 antibody or anti-SIRPa antibody or CD47-binding sequence of SIRPa ECD; fusion protein comprising anti-CD24 antibody or anti-SIGLEC10 antibody or CD24-binding sequence of SIGLEC10 ECD.

[0147] In one embodiment, the present invention provides method of treating a subject having a disease or disorder comprising administering to the subject a fusion protein of the invention. In certain embodiments the patient has cancer.

[0148] In various embodiments, a subject may be administered one or more fusion proteins described in the invention. In some embodiments, the fusion proteins comprise one or more of TGFbRII ECD, VEGFR ECD, PD1 ECD, BTLA ECD, SIRPa ECD, TIM3 ECD, and SIGLEC10 ECD.

[0149] In various embodiments, a subject may be administered one or more fusion proteins described in the invention in combination with a polypeptide that disables an immune cell inhibitory molecule or T cell co-inhibitory molecule (e.g., CTLA-4, BTLA, TIM-3, CEACAM1, or CEACAM-5, TIGIT, PVRIG, VISTA, VSIG8, LAG-3, CD47, SIRPa, CD24, SIGLEC10, or LILRB1). In some embodiments, this polypeptide is an antibody. In other embodiments, the polypeptide is a fusion protein comprising the ECD of a T cell co-inhibitory molecule. In some embodiments, this polypeptide may be PD1-Fc, TIM3-Fc, or BTLA-Fc. In some embodiments, the polypeptide may be an anti-PD¹/anti-PDL1 mAb. Exemplary such antibodies are anti-PD1 (e.g., nivolumab, pembrolizumab) and anti-PDL1 (e.g., durvalumab, avelumab, atezolizumab).

[0150] In various embodiments, a subject may be administered one or more fusion proteins described in the invention in combination with a second fusion protein described in the invention. In various aspects, this second fusion protein disables a T cell co-inhibitory molecule. In some embodiments, this second fusion protein comprises BTLA ECD, TIM-3 ECD, or PD-1 ECD.

[0151] In various embodiments, a subject may be administered one or more fusion proteins described in the invention in combination with an antibody or fusion protein that activates an T cell co-stimulatory molecule (e.g., OX40, 41BB, ICOS, GITR, HVEM, CD27, CD40, CD30, DNAM). In some embodiments, the fusion protein comprises the ECD of a T cell co-stimulatory ligand (e.g., OX40L, 41BBL, ICOSL, GITRL, LIGHT, CD70, CD40L, CD30L) that binds a T cell co-stimulatory receptor as an agonist.

[0152] In various embodiments, a subject may be administered one or more fusion proteins described in the invention in combination with an inhibitor of TGFb/TGFbR. In some aspects, this TGFb/TGFbR inhibitor is selected from: a-TGFb antibody; a-TGFbR antibody; TGFbRII ECD containing fusion protein (e.g. TGFbRIIecd-Fc); TGFbR TKI (e.g. galunisertib); anti-GARP antibody; anti-LAP antibody; ALT comprising TGFbRII ECD; ALT that inhibits TGFb/TGFbR; fusion proteins described in this invention that inhibit TGFb/TGFbR.

[0153] In various embodiments, a subject may be administered one or more fusion proteins described in the invention in combination with an inhibitor of VEGF/VEGFR. In some aspects, the VEGF/VEGFR inhibitor may be selected from: anti-VEGF antibody (e.g., bevacizumab), anti-VEGFR antibody (e.g. ramucirumab), VEGFR kinase inhibitor (e.g., sunitinib, sorafenib, axitinib, cabozantinib, regorafenib, pazopanib, vandetanib, lenvatenib), or VEGFR ECD-Fc fusion protein (e.g., aflibercept).

[0154] In various embodiments, a subject may be administered one or more fusion proteins described in the invention in combination with an inhibitor of TH17 differentiation and/or function. In some aspects, this agent is an inhibitor of the interaction between IL23/IL23R, IL1/IL1R, IL6/IL6R, or IL17/IL17R. In some aspects, this agent is selected from: anti-IL17R antibody, anti-IL17 antibody, anti-IL17 nanobody; anti-IL6R antibody, anti-IL6 antibody; IL23 antibody, anti-IL23R antibody; anti-IL1R antibody, anti-IL1 antibody. In other aspects, this agent is a fusion protein described in the invention that inhibits IL23/IL23R, IL1/IL1R, IL6/IL6R, IL17/IL17R.

[0155] In various embodiments, a subject may be administered one or more fusion proteins described in the invention in combination with an immunocytokine or cytokine fusion protein comprising an active ligand or ligand fragment of IL12 or IL15.

[0156] In various embodiments, a subject may be administered one or more fusion proteins described in the invention in combination with a polypeptide that binds a tumor cell- or tumor antigen, tumor growth factor or growth factor receptor. In one aspect, this polypeptide is an antibody. In another aspect, this polypeptide is conjugated to a cytotoxic compound. In a further aspect, this polypeptide is an ADC. In a further aspect, this polypeptide is an ALT-DC.

[0157] In various embodiments, a subject may be administered one or more fusion proteins described in the invention in combination with a chimeric antigen receptor T cell (CAR T cell)

[0158] In various embodiments, a subject may be administered one or more fusion proteins described in the invention in combination with an immunotherapeutic agent.

[0159] In various embodiments, a subject may be administered one or more fusion proteins described in the invention in combination with an inhibitor of tumor cell signaling that promotes tumor cell survival, proliferation, invasion, and/or metastases; tumor angiogenesis; or immune dysfunction in the TME.

[0160] In various embodiments, a subject may be administered one or more fusion proteins described in the invention in combination with a chemotherapeutic or cytotoxic agent, a DNA repair inhibitor or PARP inhibitor, a tumor vaccine or viriolytic agent; or ionizing radiation.

### BRIEF DESCRIPTION OF THE DRAWINGS

[0161] FIG. 1 is a Schematic representation of anti-PDL1-BTLA ECD and anti-PDL1-TGFbRII ECD-BTLA ECD.

[0162] FIGS. 2A-2B show antibody-ligand traps containing BTLA ECD localize to HVEM-expressing cells and simultaneously counteract BTLA-mediated suppression & promote HVEM-mediated activation of T cells. BTLA ligation by HVEM inhibits T cell activation via SHP-1-mediated inhibition of CD28 and CD3z signaling. HVEM ligation by LIGHT or BTLA (in trans) promotes T cell activation. The antibody ligand traps of the invention comprising a BTLA ECD which binds HVEM, thereby disrupting its interaction with both BTLA and CD160. In addition, ligation of T cell HVEM by BTLA ECD of the ALT may promote HVEM-mediated costimulatory signals for T cell activationPD-1 ligation by PD-1 ligands (PD-L1 or PD-L2) inhibits T cell activation via SHP-2-mediated inhibition of CD28 signaling. The interaction of PD-L1 with PD-1 can be disrupted by antibodies targeting either PD-L1 or PD-1, or a PD1 ECD that binds both PD-L1 and PD-L2. Antibody ligand traps comprising a BTLA ECD fused to an antibody that specifically binds PD-L1, or PD-1 can simultaneously inhibit PD-L1/PD-1 and HVEM/BTLA induced SHP1/2 mediated suppression of CD28 and CD3 signaling. As such, these molecules of the invention can counteract both HVEM/BTLA and PD-L1 mediated immune suppression in the tumor environment, thereby enhancing antitumor immune responses.

[0163] FIGS. 3A-3B show the characterization of a-PDL1-BTLA ECD, a-PDL1-TGFbRII and a-PDL1-TGFbRII ECD-BTLA ECD. 3A: SDS-PAGE under reducing (R) and non-reducing (NR) conditions was used to compare the full-length (FL), heavy chain (HC) and light chain (LC) of anti-PDL1 (atezolizumab), anti-PDL1-BTLA ECD and anti-PDL1-TGFbRII ECD-BTLA ECD. 3B: SEC-HPLC analysis of anti-PDL1 (atezolizumab), anti-PDL1-BTLA ECD and anti-PDL1-TGFbRII; ECD-BTLA ECD (>99% monomericity).

[0164] FIGS. 4A-4D show the target binding ability of a-PDL1-BTLA ECD, a-PDL1-TGFbRII and a-PDL1-TGFbRII ECD-BTLA ECD. 4A: Standard ELISA showing the ability of anti-PDL1 (atezolizumab), anti-PDL1-BTLA ECD and anti-PDL1-TGFbRII ECD-BTLA ECD to bind PD-L1. 4B: Standard ELISA showing the ability of anti-PDL1-TGFbRII ECD and anti-PDL1-TGFbRII ECD-BTLA ECD to bind TGFb. 4C: Standard ELISA showing the ability of; anti-PDL1-BTLA ECD and anti-PDL1-TGFbRII ECD-BTLA ECD to bind the BTLA ligand HVEM. 4D: ELISA showing the ability of anti-PDL1-BTLA ECD and anti-PDL1-TGFbRII ECD-BTLA ECD to simultaneously bind PD-L1 and the BTLA ligand HVEM.

[0165] FIGS. 5A-5C show anti-PDL1, and anti-PDL1-BTLA ECD activity. 5A: Ability of anti-PDL1, anti-PDL1-BTLA ECD to elicit antitumor immunity and inhibit the growth of syngeneic B16-F10 tumors in C57BL/6 muMt-mice. 5B: Ability of anti-PDL1, anti-PDL1-BTLA ECD to elicit antitumor immunity and inhibit the growth of cancers was examined in human immune reconstituted NSG mice bearing human WiDR-colorectal cancer cells. 5C: Ability of anti-PDL1, anti-PDL1-BTLA ECD, anti-PDL1-TGFbRII ECD and anti-PDL1-BTLA ECD-TGFbRII ECD to elicit antitumor immunity and inhibit the growth of cancers was examined in human immune reconstituted NSG mice bearing human BXPC3-pancreatic cancer cells.

[0166] FIGS. 6A-6C show a-VEGF-PD1 activity. 6A: Mice are treated with mAbs 24 h prior to the radiotracer injection. 6B: CD3+ are counted in immunohistochemistry images of tumors in control group. anti-VEGF group, or anti-VEGF-PD1 ECD group. 6C: NSG mice immune reconstituted with tumor-matched HLA A2+ human CD34+ HSC and bearing KRAS mutant D-MUT1 human colorectal cancer tumor xenografts were treated (5 mg/kg i.p. weekly) with vehicle alone (untreated control) or the following antibodies (either alone or in combination), as indicated: with either vehicle alone (untreated control) or the following antibodies: a-VEGF-PD1 ECD; a-VEGF (bevacizumab.

[0167] FIGS. 7A-7C show a-VEGF-TGFbRII-PD1 activity. 7A: Structure of anti-VEGF-TGFbRII-PD1. anti-VEGF binds VEGF, TGFbRII binds TGFb, PD1 binds PD-L1 and PD-L2. 7B: NSG mice immune were reconstituted with tumor-matched HLA A2+ human CD34+ HSC followed by subcutaneous implantation of WiDR tumor xenografts. 7C: NSG mice immune were reconstituted with tumor-matched HLA A2+ human CD34+ HSC followed by subcutaneous implantation of BXPC3 tumor xenografts.

[0168] FIGS. 8A-8C show a-VEGF-TGFbRII-PD1 activity. 8A: Standard ELISA showing the ability of anti-VEGF (bevacizumab), anti-VEGF-TGFbRII-PD1 to bind VEGF. 8B: Standard ELISA showing the ability of anti-VEGF-TGFbRII-PD1 to bind TGFb. 8C: Standard ELISA showing the ability of anti-VEGF-TGFbRII-PD1 to bind TGFb as well as IgG-TGFbRII.

[0169] FIGS. 9A-9C shows anti-HER2-TGFbRII and anti-HER2-PD1 activity. 9A: SDS-PAGE under reducing (R) and non-reducing (NR) conditions was used to compare the full-length (FL), heavy chain (HC) and light chain (LC) of anti-HER2-TGFβRIIECD, anti-HER2-PD1 ECD, and anti-HER2 (Trastuzumab). 9B: The ability of anti-HER2-TGFβRII to simultaneously bind HER2 and TGF-β1 was evaluated by a ‘double-sandwich’ ELISA wherein anti-HER2-TGFβRIIECD was added to HER2-Fc coated plates, followed by rhTGF-β1 (1 ng/ml) that was detected by a biotinylated anti-huTGF-β1 antibody. 9C: The ability of anti-HER2-TGFβRII to bind TGF-β1 was also evaluated by competition immunoassays.

[0170] FIGS. 10A-10B show anti-HER2-TGFbRII activity. 10A: Residual tumors in TrastuzumabR BT-474 (BT-474-TR) F2 tumor-bearing mice following treatment with anti-HER2-TGFβRII were significantly smaller (mean±SEM=31.7±6.5) than those in F2 mice treated with anti-HER2 mAb (mean±SEM=453.9±121.4) (p=0.003). 10B: Serum was collected from TrastuzumabR BT-474 tumor-bearing mice.

[0171] FIGS. 11A-11C show a-EGFR-TGFbRII activity. 11A: Human tumor xenografts were generated by mammary fat pad implantation of the MDA-MB-231-Luc (D3H2LN) TNBC line in female immune deficient NOG mice (NOD/Shi-scid IL-2rgnull). 11B: Immune deficient NSG mice (NOD/Shi-scid IL-2rgnull; 6-8 weeks old) were irradiated at 200 cGy and rested for 6-8 h, followed by adoptive transfer of human CD34+ cells (7×104/mouse) from a normal donor (HLA-matched to the D-MUT1 line)(ALLCELLS). 11C: Nude mice were inoculated subcutaneously with a PDX of human HNSCC (SCC harvested from the floor of the mouth).

[0172] FIGS. 12A-12B show anti-PD1-TIM3 and anti-PDL1-TIM3 activity. 12A: (top) Schematic of anti-PD1-TIM3 ECD and anti-PDL1-TIM3 ECD. Anti-PDL1-TIM3 ECD was designed to target both PD-L1 and TIM3 ligands by fusing the C-terminus of the heavy chain of an anti-PDL1 antibody with a ligand binding sequence of the extracellular domain of TIM3 (TIM3 ECD) via a flexible linker peptide, (GGGGS)3. 12B: (top) a-PD1-TIM3 ECD (430.3±29.9) inhibits tumor growth significantly more effectively than untreated control (908.2±40.3), a-PD-1 (824.0±38.3), IgG-TIM3 ECD (825.1±79.0) or the combination of IgG-TIM3 ECD and a-PD1 (884.7±97.4) (p<0.0001). 12 B: (bottom) a-PDL1-TIM3 ECD (226.4±71.4) inhibits tumor growth more effectively than a-PDL1 (617.5±144.3), a-TIM-3 (640.9±99.6) or the combination of a-TIM-3 and a-PDL1 mAbs (653.0±59.8) (p<0.001).

### DETAILED DESCRIPTION OF THE INVENTION

[0173] The present invention is based on the seminal discovery that fusion proteins comprising at least one ligand binding sequence of the extracellular domain of a protein and a targeting moiety are effective at treating various diseases and disorders.

[0174] Before the present compositions and methods are described, it is to be understood that this invention is not limited to particular compositions, methods, and experimental conditions described, as such compositions, methods, and conditions may vary. It is also to be understood that the terminology used herein is for purposes of describing particular embodiments only, and is not intended to be limiting, since the scope of the present invention will be limited only in the appended claims.

[0175] As used in this specification and the appended claims, the singular forms “a”, “an”, and “the” include plural references unless the context clearly dictates otherwise. Thus, for example, references to “the method” includes one or more methods, and/or steps of the type described herein which will become apparent to those persons skilled in the art upon reading this disclosure and so forth.

[0176] All publications, patents, and patent applications mentioned in this specification are herein incorporated by reference to the same extent as if each individual publication, patent, or patent application was specifically and individually indicated to be incorporated by reference.

[0177] Unless defined otherwise, all technical and scientific terms used herein have the same meaning as commonly understood by one of ordinary skill in the art to which this invention belongs. Although any methods and materials similar or equivalent to those described herein can be used in the practice or testing of the invention, it will be understood that modifications and variations are encompassed within the spirit and scope of the instant disclosure. The preferred methods and materials are now described.

[0178] In some embodiments, the fusion proteins of the invention comprise a targeting polypeptide to which one or more ECDs are fused. “X” is a molecule that is specifically bound by the targeting polypeptide. “Y” is a ligand-binding sequence of an extracellular domain, or fragment thereof. In some embodiments, the fusion proteins of the invention have the structure “anti-{X}-{Y}”, where the ligand-binding sequence of the extracellular domain Y is fused to the targeting polypeptide. In some embodiments, the targeting polypeptide is an antibody that comprises at least one heavy chain and one light chain. In some embodiments, Y is fused to the C terminus of the light chain of the antibody. In other embodiments, Y is fused to the C terminus of the heavy chain of the antibody. In some embodiments, Y is fused to the N terminus of the light chain of the antibody. In other embodiments, Y is fused to the N terminus of the heavy chain of the antibody.

[0179] In some embodiments, the targeting polypeptide is an antibody or other polypeptide comprising a heavy chain and light chain connected by one or more disulfide bonds. “X” is a molecule that is specifically bound by this targeting polypeptide. “Y” is a ligand-binding sequence of an extracellular domain, or fragment thereof “Z” is a ligand-binding sequence of a different extracellular domain, or fragment thereof. In some embodiments, the fusion proteins of the invention have the structure “anti-{X}-{Y}-{Z}”, where Y and Z are fused to the polypeptide that binds X. In some embodiments, Y is fused to the C terminus of the heavy chain of the antibody and Z is fused to the C terminus of the light chain of the antibody. In other embodiments, Y is fused to the C terminus of the light chain of the antibody and Z is fused to the C terminus of the heavy chain of the antibody. In some embodiments, Y is fused to the N terminus of the heavy chain of the antibody and Z is fused to the N terminus of the light chain of the antibody. In other embodiments, Y is fused to the N terminus of the light chain of the antibody and Z is fused to the N terminus of the heavy chain of the antibody.

[0180] In some embodiments, the ECD is fused to the C terminus of the antibody heavy chain or light chain. In other cases, the ECD may be fused to the N terminus of the antibody heavy chain or light chain.

[0181] In some embodiments, the fusion proteins comprise two ECDs (ECD #1, ECD #2) fused together. Fusion proteins that comprise two ECDs fused together may be referred to as “ECD-ECD”s in this invention. In some embodiments, the fusion protein additionally comprises a Fc domain. In some embodiments, the fusion protein additionally comprises a linker. In some embodiments, the structure of the fusion protein is N (terminus)-ECD #1-ECD #2-C (terminus). In other embodiments, the structure is N-ECD #2-ECD #1-C. In other embodiments, the structure is N-ECD #1-linker-ECD #2-C or N-ECD #2-linker-ECD #1-C. In other embodiments, the structure is N-ECD #1-Fc-ECD #2-C or N-ECD #2-linker-ECD #1-C. In other embodiments, the structure is N-ECD #1-Fc-linker-ECD #2-C, or N-ECD #2-Fc-linker-ECD #1-C.

[0182] In one aspect, two or more ECDs may be fused in serial. In one aspect, the fusion protein comprises a targeting polypeptide and two or more ECDs are fused in serial on the same chain of the targeting polypeptide. In one aspect, two or more ECDs are fused in serial on the light chain of a targeting polypeptide that is an antibody. In one aspect, the two or more ECDs are connected by linkers. For example, the light chain of a fusion protein of the invention might be N terminus-antibody light chain-linker-ECD #1-linker-ECD #1-C terminus. In another aspect, the ECD may be fused to both the N and C terminii of the same chain. For example, the light chain of a fusion protein of the invention might be N terminus-ECD #1-linker-antibody light chain-linker-ECD #1-C terminus.

[0183] In one aspect, component parts of the fusion proteins of the invention are fused via a flexible linker. In a further aspect, the flexible linker comprises the polypeptide sequence (GGGGS)n where n is between 1 and 10. In another aspect, the flexible linker is selected from the following list: (GGGGS)3 (SEQ ID NO: 200), (GGGGS)4 (SEQ ID NO: 201), waldo1999 (SEQ ID NO: 202), bird1988-1 (SEQ ID NO: 203), bird1988-2 (SEQ ID NO: 204). In one aspect, a linker may be used to fuse an ECD to a targeting polypeptide. In another aspect, a linker may be used to fuse one ECD to another. In another aspect, a linker may be used to fuse an ECD to the C terminus of the CH3 region of the heavy chain of an Fc polypeptide. In another aspect, the linker is rigid. In a further aspect, the rigid linker is selected from the following list: (EAAAK)3 (SEQ ID NO: 205), A(EAAAK)3A (SEQ ID NO: 206), (AP)7 (SEQ ID NO: 207).

[0184] “Reeptor ECD”, “extracellular domain”, “ECD”, “ECD”, “ligand trap” and “LT” are used interchangeably in this invention. In any case where any of these terms are used, they may also refer to any ligand-binding sequence of the extracellular domain or fragment thereof in question.

[0185] The ECD(s), or “ligand traps”, of the fusion protein enable one or more of the following functions: (1) sequestration of ligands/cytokines that contribute to angiogenesis in the tumor microenvironment; (2) sequestration of ligands/cytokines that promote tumor cell survival, proliferation, invasion, and/or metastasis; (3) sequestration of ligands/cytokines that contribute to tumor-induced immune tolerance or immune dysfunction; (4) activation of a T cell co-stimulatory molecule; (5) inhibition of a T cell co-inhibitory molecule; (5) preferential localization to the target tissue/cell microenvironment expressing its cognate ligand(s).

[0186] In some embodiments, an ECD of the invention may be modified in one or more of the following ways: (1) substitution or deletion of residues that are not necessary for ligand binding, (2) substitution of residues to remove N-linked glycosylation sites, (3) substitution, addition, or deletion of residues to increase affinity to one or more of its cognate ligands, (4) substitution, addition, or deletion of residues to improve the expression of the fusion protein, (5) substitution, addition, or deletion of residues to allow for site-specific conjugation of drug conjugates, (6) substitution, addition, or deletion of residues to decrease the specificity of the ligand trap to one or more of its cognate ligands while maintaining or increasing its specificity to other cognate ligands, (7) fusion of non-continuous domains of the same ECD, (8) fusion of domains from different isoforms of the same ECD, (9) fusion of domains from different members of the same ECD family. In some embodiments, any of these modifications refer to the same ECD if they result in a sequence that maintains 90%, 95%, 98%, or 99% sequence identity to a ligand-binding sequence of the ECD.

[0187] N-glycosylation occurs at the following consensus sites: NX1S or NX1T, where X1 is any amino acid that is not proline. N is asparagine, S is serine, and T is threonine. More rarely, N-glycosylation can occur at NX2C where N is asparagine, X2 is any amino acid, and C is cysteine. In some embodiments, one or more N-glycosylation consensus sites may be mutated to reduce glycosylation of the ligand trap. In some embodiments, hypoglycosylation of the ligand trap is achieved by mutation of an asparagine residue in a N-glycosylation consensus sequence to another polar amino acid (i.e., serine, threonine, or glutamine). In other embodiments, hypoglycosylation of the ligand trap is achieved by mutation of an asparagine residue in a N-glycosylation consensus sequence to alanine.

[0188] In various embodiments, the fusion proteins of the invention comprise one or more of the following ECDs: (1) a ligand-binding sequence of an extracellular domain of TGFbR (e.g., TGFbRII ECD), or fragment thereof. In one aspect, this ECD binds TGFb1, TGFb2, and/or TGFb3; (2) a ligand-binding sequence of an extracellular domain of PD-1 (e.g., PD1 ECD), or fragment thereof. In one aspect, this ECD binds PD-L1 and/or PD-L2. In one embodiment, this ligand trap has one or more amino acid substitutions which increase its affinity for PD-L1 and/or PD-L2; (3) a ligand-binding sequence of an extracellular domain of VEGFR (e.g., VEGFR1, VEGFR2, VEGFR3), or fragment thereof, or a fusion of VEGF-binding sequences of one or more VEGFR extracellular domains (e.g., VEGFR1 domain 2 fused to VEGFR2 domain 3). In one aspect, this ECD binds VEGFA, VEGFB, VEGFC, and/or PIGF; (4) a ligand-binding sequence of an extracellular domain of TIM-3 (e.g., TIM3 ECD), or fragment thereof, or a hypoglycosylated variant of TIM-3, or fragment thereof. In one aspect, this ECD binds CEACAM1, CEACAM5, phosphatidyl-serine, and/or Galectin-9; (5) a ligand-binding sequence of an extracellular domain of SIRPa (e.g., SIRPa-ECD), or fragment thereof; or a hypoglycosylated variant of SIRPa, or fragment thereof. In one aspect, this ECD binds CD47; (6) a ligand-binding sequence of an extracellular domain of B- and T-lymphocyte attenuator (BTLA ECD) or fragment thereof, or a hypoglycosylated variant of BTLA or fragment thereof. In one aspect, this ECD binds herpesvirus entry mediator (HVEM); (7) a ligand-binding sequence of an extracellular domain of SIGLECi0 or fragment thereof, or a hypoglycosylated variant of SIGLECi0 or fragment thereof. In one aspect, this ECD binds CD24.

[0189] In one embodiment, the fusion protein comprises a ligand-binding sequence of an extracellular domain of TGFbR (e.g., TGFbRII ECD) or fragment thereof to bind and disable TGFb in the target cell microenvironment. In some embodiments, the TGFbR ECD may be a ligand-binding sequence of TGFbRII ECD. In some embodiments, the TGFbR ECD may be a fusion of domains from TGFbRII and TGFbRIII. In some embodiments, the TGFbR ECD may be selected from the following list: SEQ ID NOS: 177; 178; 179; 180. TGFβ inhibits the expression of cytotoxic effector molecules in immune cells and suppresses their ability to induce antibody-mediated ADCC of tumor cells. TGFb results in a significant decrease in their expression of several cytotoxic effector molecules, including granzyme B, Apo2L/TRAIL, CD95L/FasL, and IFN-γ. TGFb inhibits T cell-mediated antitumor immunity. TGF suppresses the expression of interferon-gamma (IFNgamma), restricts the differentiation of TH1 cells, attenuates the activation and cytotoxic function of CD8+ effector cells, and inhibits the development of central memory T cells. Most significantly, TGFb induces the differentiation of regulatory T cells (Tregs), a sub-population of immunosuppressive CD4+ T cells that express the CD25 and FOXP3. TGFb induces the expression of FOXP3, the signature transcription factor that determines and maintains the functional program of the Treg lineage. Besides inhibiting NK cells and regulating T cell lineage determination and function, TGFb also promotes the polarization of pro-tumorigenic M2 macrophages which secrete high levels of TGFb, IL-6, and IL-10. As such, TGF counteracts the ability of tumor-targeted antibody to induce adaptive antitumor immunity via Fc-FcR mediated antigen cross-presentation by DCs. In one aspect, the ligand-binding sequence of TGFbRII ECD that is fused to a targeting antibody binds and traps TGFb1, TGFb2, and/or TGFb3. As such, a fusion protein of the invention comprising TGFbRII ECD thus uniquely sequesters TGFb1, TGFb2, and TGFb3 in the tumor or target microenvironment in such a way that all immunosuppressive, angiogenic, and tumor-promoting effects of TGFb are blocked in the target or tumor cell microenvironment.

[0190] In one embodiment, the fusion protein comprises a ligand-binding sequence of an extracellular domain of Programmed Death-1 (PD-1 ECD) or fragment thereof to bind and disable PD-1 ligands (PD-L1 or PD-L2) in the target cell microenvironment. Upregulation of Programmed death-1 ligands (PD-L1, PD-L2) is a major common denominator of immune tolerance via suppression of natural killer (NK) cell and T cell-mediated antitumor immunity. Engagement of PD-1 by its ligands [PD-L1 (B7-H1); PD-L2 (B7-DC)], inhibits the proliferation, survival, and function of T cells, and cooperates with TGF-b to promote the differentiation and function of Tregs. Tumor cell expression of PD-1 ligands in the tumor microenvironment inhibits activation of tumor infiltrating T cells via interaction of PD-L1 and PD-L2 with either PD-1 or B7. PD1 ECD completely sequesters both PD-L1 and PD-L2, preventing either ligand from interacting with PD-1 on T cells/NK cells or CD80/86 on DCs. This complete inhibition of all PD-1 ligand activity is not recapitulated by either anti-PD1 or anti-PDL1 antibodies: anti-PDL1 has no effect on PD-L2 signaling; and anti-PD1 has no effect on PD-L1/2 binding to CD80/86 on DCs. In one aspect, the ligand-binding sequence of PD1 ECD that is fused to a targeting antibody binds and traps PD-L1 and/or PD-L2. In one aspect, the PD-1ECD fused to the targeting antibody comprises a PD-1ECD sequence incorporating specific mutations in residues to increase the affinity to PD-L1 and/or PD-L2 (high affinity PD-1ECD). As such, the fusion protein comprising a fused PD-1ECD uniquely sequesters both PD-L1 and PD-L2 in the tumor microenvironment in such a way that all immunosuppressive effects of PD-L1/2 are blocked in the target cell microenvironment. In some embodiments, the PD1 ECD may be selected from the following list: SEQ ID NOS: 169; 170; 171

[0191] In one embodiment, the fusion protein comprises a ligand-binding sequence of an extracellular domain of Vascular endothelial growth factor receptor (VEGFR1 and/or VEGFR2) or fragment thereof to bind and disable VEGF in the target cell microenvironment. VEGF induces angiogenesis and immune suppression in the tumor microenvironment. VEGF is a high-affinity ligand for receptor tyrosine kinases VEGFR1, VEGFR2, and VEGFR3. VEGFA mRNA is overexpressed in most human tumors, where its expression correlates with invasiveness, increased vascular density, metastasis, tumor recurrence and poor prognosis. Tumors frequently harbor intrinsic genetic alterations that activate signaling pathways (RAS/MAPK, PI3K/AKT, or STAT3) leading to hypoxianti-inducible factor 1 (HIF-1)-mediated induction of VEGF expression in the tumor microenvironment. In addition, specific cytokines (IL-6, TGFb, IL-17) play a key role in increasing local levels of VEGF in the tumor immune microenvironment. VEGFA secreted by tumor cells and surrounding stroma stimulates the proliferation and survival of endothelial cells, leading to the formation of new blood vessels. In addition to secreting VEGF, tumors themselves express VEGF-R1 and VEGF-R2. VEGF promotes tumor migration and metastasis, via autocrine/paracrine stimulation of angiogenesis, cancer stem cell renewal and stability. VEGF also plays an angiogenesis-independent role in cancer immune evasion. VEGF inhibits anti-tumor immunity on multiple levels including promotion and expansion of inhibitory immune cells, such as myeloid-derived suppressor cells (MDSC), suppression of dendritic cell (DC) maturation, mitigation of effector T cell responses, and alteration of lymphocyte development and trafficking. In one aspect, the fusion protein comprises a ligand-binding sequence of VEGFR ECD that binds VEGFR ligands, (VEGF-A, VEGF-B) and optionally placental growth factor (PIGF), and prevents these ligands from binding their endothelial receptors, VEGFR-1 and VEGFR-2. In one aspect, the fusion protein comprises the vascular endothelial growth factor (VEGF) binding portions from the extracellular domains of human VEGF receptors 1 and 2. In one aspect, the VEGF trap comprises Ig domain 2 from VEGFR1, fused to Ig domain 3 from VEGFR2. In one embodiment, the fusion protein comprises amino acids 103-204 of VEGFR1 fused to amino acids 206-308 of VEGFR2. In one embodiment, the fusion protein comprises the same domains of VEGFR1 and VEGFR2 as aflibercept. In some embodiments, the VEGFR ECD may be selected from the following list: SEQ ID NOS: 184; 185; 186

[0192] In one embodiment, the fusion protein comprises a ligand-binding sequence of an extracellular domain of TIM-3 (TIM3 ECD) or fragment thereof to bind and disable TIM-3 ligands (CEACAM1, CEACAM5) in the target cell microenvironment. TIM-3 and CEACAM1 are transmembrane proteins expressed on activated T cells, and their expression is induced by cytokines involved in effector T cell differentiation (e.g., IFNgamma). CEACAM1 suppresses T cell activity via homodimerization of its extracellular domains in cis or trans (CEACAM1/CEACAM1). This homophilic interaction is required for phosphorylation of CEACAM1 cytoplasmic domain ITIMs and recruitment of the SHP-1/SHP-2 tyrosine phosphatases which effect proximal suppression of TCR signaling and inhibition of effector functions, including T cell proliferation, TH1 cytokine production and cytotoxicity. CEACAM1 also suppresses TCR signaling via binding TIM-3 along their shared signature “cleft.” The interaction of CEACAM1 with TIM-3 induces phosphorylation-mediated release of Bat3 and loss of Lck-mediated TCR signaling. CEACAM family members (CEACAM1, CEACAM5) are highly expressed in many tumor types, especially gastrointestinal adenocarcinomas (e.g., pancreatic cancer, colorectal cancer). Besides the cis interactions on T cells involving CEACAM1/TIM-3, CEACAM1 and CEACAM5 on tumor cells are able to induce exhaustion via trans interactions with CEACAM1 or TIM-3 on T cells. CEACAM family members also suppress the effector functions of innate immune cells. In one aspect, the ALT comprises a ligand-binding sequence of TIM-3ECD that binds CEACAM1 and/or CEACAM5. In another aspect, the TIM-3ECD sequence may contain mutations in amino acid residues that are normally glycosylated in order to reduce glycosylation at these sites. In one aspect, the fused TIM3 ECD serves as a decoy to sequester TIM-3 ligands (CEACAM1 and CEACAM5 on T cells and/or tumor cells), thereby disrupting cis and trans homodimeric and heterodimeric interactions of the CEACAM axis that lead to T cell exhaustion. Decoration of fusion protein-targeted cells in the TME with a decoy TIM-3ECD sequesters CEACAM family members by competing with native TIM-3 to bind the FG-CC′ cleft of CEACAM, enabling native TIM-3 on T cells to remain unligated and able to sustain Bat3/Lck-mediated T cell activation. In addition to counteracting T cell exhaustion, in another aspect the fusion protein comprising TIM3 ECD can simultaneously binds a tumor cell and CEACAM-1 on a T cell, thereby recruiting and sustaining tumor-reactive cytotoxic T cells in the tumor cell microenvironment.

[0193] In one embodiment, the ligand trap may be a ligand-binding sequence of an extracellular domain of TIM-3 (TIM3 ECD) or fragment thereof that is hypoglycosylated or deglycosylated (hypoglycosylated TIM-3 ECD or deglycosylated TIM-3 ECD). In some embodiments, any N-glycosylation consensus site of TIM3 ECD is mutated to reduce glycosylation of TIM3 ECD. In some embodiments, hypoglycosylation of the TIM3 ECD is achieved by mutations at one or more of the following sites: N78, V79, T80, N151, L152, and/or T153.

[0194] In some embodiments, hypoglycosylation of the TIM3 ECD is achieved by mutation of a threonine residue in a N-glycosylation consensus site to isoleucine. In some embodiments, hypoglycosylation of the TIM3 ECD is achieved by a T801 mutation.

[0195] In some embodiments, the TIM3 ECD or TIM3 ECD variant may be selected from the following list: SEQ ID NOS: 181; 182; 183.

[0196] In one embodiment, the fusion protein comprises a ligand-binding sequence of an extracellular domain of B- and T-lymphocyte attenuator (BTLA-ECD) or fragment thereof. In one aspect, this ligand trap (BTLA ECD) binds herpesvirus entry mediator (HVEM). In one aspect, the BTLA ECD comprises sequence that binds at least the cysteine-rich domain 1 region (CRD1) of HVEM. In another aspect the BTLA ECD sequence that binds HVEM enables HVEM to recruit the signaling molecules TNFR-associated factor (TRAF1, TRAF2, TRAF3 and/or TRAF5, activation of nuclear factor-κB (NF-κB) and/or activator protein 1 (AP1) transcription factors. In another aspect the BTLA ECD sequence promotes the co-stimulation or survival of immune cells or T-cells. In one aspect, the BTLA ECD sequence does not interfere with the interaction between HVEM and LIGHT. In another aspect, the BTLA ECD sequence binds HVEM and promotes HVEM-mediated activation of NF-κB. In another aspect, the BTLA ECD sequence lacks the C-terminal cytoplasmic domain that recruits SHP-1 or SHP-2. In this aspect, BTLA ECD binds HVEM and prevents HVEM from binding native BTLA, thereby blocking the ability of HVEM to bind native BTLA and consequent BTLA-mediated SHP1/SHP2-dependent inhibition of TCR signaling. In addition to blocking inhibitory signaling, the BTLA ECD sequence may activate HVEM-mediated activation and/or survival of T cells.

[0197] In one embodiment, the ligand trap may be a ligand-binding sequence of an extracellular domain of BTLA (BTLA ECD) or fragment thereof that is hypoglycosylated or deglycosylated (hypoglycosylated BTLA ECD or deglycosylated BTLA ECD). In some embodiments, any N-glycosylation consensus site of BTLA ECD is mutated to reduce glycosylation of BTLA ECD. In some embodiments, hypoglycosylation of the BTLA ECD is achieved by mutations at one or more of the following sites: N76, G77, T78, N95, 196, S97, N111, G112, and/or S113.

[0198] In some embodiments, the BTLA ECD or BTLA ECD variant may be selected from the following list: SEQ ID NOS: 165; 166; 167; 168

[0199] In one embodiment, the fusion protein comprises a ligand-binding sequence of an extracellular domain of SIRPa (SIRPa-ECD) or fragment thereof to bind and disable CD47. The ligand-binding N-terminal domain of SIRPa (SIRPa d1) binds CD47 through the loops at the end of the domain. CD47 possesses an unusual disulphide link between the IgSF domain and one of the loops between the transmembrane regions, which is required for optimal binding of SIRPa. In one embodiment, the fusion protein comprises a CD47 binding sequence of the extracellular region or IgSF domain of SIRPa (SIRPa ECD). In one aspect, the fusion protein comprises a CD47 binding sequence of the N-terminal domain of SIRPa (SIRPa dl). In one aspect, the SIRPa ECD may be mutated to have higher affinity for CD47. In some embodiments, the SIRPa-ECD may be selected from the following list: SEQ ID NOS: 173; 174; 175; 176

[0200] In one embodiment, the fusion protein comprises a ligand-binding sequence of an extracellular domain of Sialic Acid Binding Ig Like Lectin 10 (SIGLEC10 ECD) or fragment thereof to bind and disable CD24. SIGLEC10 is highly expressed by tumor-associated macrophages; and tumors often express high levels of CD24. Endogenous SIGLEC10 contains two ITIM domains on its cytoplasmic tail, and ligation of SIGLEC10 by CD24 results in SHP1/SHP2-mediated inhibitory signaling that prevent the macrophage from phagocytosing the CD24-expressing tumor cell. In some embodiments, the SIGLEC10 ECD may be selected from the following list: SEQ ID NOS: 172.

[0201] In some embodiments, the fusion protein comprises a ligand-binding sequence of the extracellular domain of a T cell co-stimulatory molecule or a fragment thereof. In one aspect, this ECD is capable of binding its cognate T cell co-inhibitory molecule and promote T cell activation. In some embodiments, this T cell co-stimulatory molecule is selected from OX40L, 41BBL, ICOSL, GITRL, LIGHT, CD70, CD40L, CD30L.

[0202] In some embodiments, the fusion protein may comprise a ligand-binding sequence of the extracellular domain of CD160 or a fragment thereof.

[0203] In various embodiments, the fusion proteins of the invention comprise a targeting polypeptide (TP) in addition to one or more ligand traps. The targeting polypeptide comprises a polypeptide which specifically binds a component of a tumor cell, tumor microenvironment, tumor associated growth factor or receptor, tumor associated cytokine or receptor, tumor associated T lymphocyte, T cell co-stimulatory or inhibitory molecule, immune cell, pathogen, or pathogen-associated cell.

[0204] In some embodiments, this targeting polypeptide is an antibody. In such cases, the fusion protein of the invention may be referred to as an “antibody-ligand trap”, or “ALT”, which are used interchangeably.

[0205] In one aspect, the targeting polypeptide comprises an antigen-binding domain of an immunoglobulin, antibody, bispecific or multispecific antibody, antibody fragment, single chain variable fragment (scFv), bivalent or multivalent scFv, Affimer, a ligand-binding sequence from the extracellular domain (ECD) of a receptor, or Fc-containing polypeptide. In certain aspects, the targeting polypeptide is an antibody.

[0206] In the case that the targeting polypeptide is a bispecific antibody (bsAb), it may be an obligate or non-obligate bsAb. In some embodiments, one of the targets of the bsAb is CD3.

[0207] In some embodiments, the bsAb is bivalent in a 1+1 format (i.e., one binding site for each target). In a further embodiment, the bispecific antibody may be a tandem VHH nanobody fusion, tandem scFvs (e.g., BiTE), DART, diabody, F(ab)2, or scFv-Fab fusion. In another embodiment, the bispecific antibody may comprise two or more asymmetric chains: for example, hetero heavy chains with forced knob-and-hole HL pairing, hetero heavy chains with CrossMab VH/VL swapped domains, hetero heavy chains with CrossMAB CH1/CL swapped domains, DART-Fc, LP-DART, or half-life-extended BiTE.

[0208] In other embodiments, the bsAb is trivalent in a 1+2 format (i.e., 1 binding site for one target and 2 binding sites for the other target). In a further embodiment, the bsAb is a CrossMab with 3 F(ab) regions.

[0209] In other embodiments, the bsAb is tetravalent in a 2+2 format (i.e., 2 binding sites for each target). In a further embodiment, the bsAb is a fusion of a normal IgG with 2 scFv domains, Bs4Ab, DVD-Ig, tetravalent DART-Fc, four scFv domains fused to Fc, CODV-Ig, a pair of tandem VHH nanobodies fused to Fc, or a CrossMab with 4 F(ab) regions.

[0210] Examples of bsAbs that may be used as targeting polypeptides of the fusion proteins of the invention include the following: CD3×B7-H3 (e.g., orlotamab), CD3×BCMA (e.g., AMG420, AMG701, EM801, JNJ-64007957, PF-06863135, REGN5458), CD3×CD19 (e.g., A-319, AFM11, AMG562, blinatumomab), CD3×CD20 (e.g., mosunetuzumab, plamatomab, REGN1979, CD20-TCB), CD3×CD33 (e.g., AMG330, AMG673, AMV-564, GEM333), CD3×CD38 (e.g., AMG424, GBR1342), CD3×CEA (e.g., Cibisatamab), CD3×EGFRvIII (e.g., AMG596), CD3×EpCAM (e.g., A-337, catumaxomab, removab), CD3×FLT3 (e.g., AMG427), CD3×GPC3 (e.g., ERY974), CD3×gpA33 (e.g., MGD007), CD3×GPRC5D (e.g., JNJ-64407564), CD3×HER2 (e.g., GBR1302, M802, RG6194), CD3×MUC16 (e.g., REGN4018), CD3×P-Cadherin (e.g., PF-06671008), CD3×PSMA (e.g., AMG160, MOR209, pasotuxizumab), CD3×SSTR2 (e.g., tidutamab), CD40×MSLN (e.g., ABBV-428), PD-1×ICOS (e.g., Xmab23104), or PD-L1×4-1BB (e.g., MCLA-145)

[0211] Exemplary fusion proteins of the invention comprising one or more receptor ECDs and a bispecific antibody include anti-CEACAM5/CD3 (cibisatamab) fused to BTLA on HC—e.g., SEQ ID NOs: 747, 748, 218, 219; anti-CEACAM5/CD3 (cibisatamab) fused to BTLA on LC—e.g., SEQ ID NOs: 216, 217, 749, 219; anti-CEACAM5/CD3 (cibisatamab) fused to PD1 on HC—e.g., SEQ ID NOs: 751, 752, 218, 219; anti-CEACAM5/CD3 (cibisatamab) fused to PD1 on LC—e.g., SEQ ID NOs: 216, 217, 753, 219; anti-CEACAM5/CD3 (cibisatamab) fused to SIGLEC10 on HC—e.g., SEQ ID NOs: 755, 756, 218, 219; anti-CEACAM5/CD3 (cibisatamab) fused to SIGLEC10 on LC—e.g., SEQ ID NOs: 216, 217, 757, 219; anti-CEACAM5/CD3 (cibisatamab) fused to SIRPa on HC—e.g., SEQ ID NOs: 759, 760, 218, 219; anti-CEACAM5/CD3 (cibisatamab) fused to SIRPa on LC—e.g., SEQ ID NOs: 216, 217, 761, 219; anti-CEACAM5/CD3 (cibisatamab) fused to TGFbR on HC—e.g., SEQ ID NOs: 763, 764, 218, 219; anti-CEACAM5/CD3 (cibisatamab) fused to TIM3 on HC—e.g., SEQ ID NOs: 765, 766, 218, 219; anti-CEACAM5/CD3 (cibisatamab) fused to TIM3 on LC—e.g., SEQ ID NOs: 216, 217, 767, 219; anti-CEACAM5/CD3 (cibisatamab) fused to VEGFR on HC—e.g., SEQ ID NOs: 769, 770, 218, 219; anti-CD3/PSMA (pasotuxizumab) fused to BTLA—e.g., SEQ ID NO: 729; anti-CD3/PSMA (pasotuxizumab) fused to PD1—e.g., SEQ ID NO: 733; anti-CD3/PSMA (pasotuxizumab) fused to SIGLEC10—e.g., SEQ ID NO: 737; anti-CD3/PSMA (pasotuxizumab) fused to SIRPa—e.g., SEQ ID NO: 741; anti-CD3/PSMA (pasotuxizumab) fused to TIM3—e.g., SEQ ID NO: 745.

[0212] In some embodiments, one of the targets of the bispecific antibody targeting polypeptide is CD28.

[0213] In some embodiments, this targeting polypeptide is an antibody. In such cases, the fusion protein comprising an antibody and one or more ECDs may be referred to as an “antibody-ligand trap”, or “ALT”, which are used interchangeably.

[0214] In one embodiment, the targeting polypeptidein is an immunoglobulin. As used herein, the term “immunoglobulin” includes natural or artificial mono- or polyvalent antibodies including, but not limited to, polyclonal, monoclonal, multispecific, human, humanized or chimeric antibodies, single chain antibodies, Fab fragments. F(ab′) fragments, fragments produced by a Fab expression library, anti-idiotypic (anti-Id) antibodies (including, e.g., anti-Id antibodies to antibodies of the invention), and epitope-binding fragments of any of the above. The term “antibody,” as used herein, refers to immunoglobulin molecules and immunologically active portions of immunoglobulin molecules, i.e., molecules that contain an antigen binding site that immunospecifically binds an antigen. The immunoglobulin ion can be of any type (e.g., IgG, IgE, IgM, IgD, IgA, and IgY), class (e.g., IgG1, IgG2, IgG3, IgG4, IgA1, and IgA2) or subclass of immunoglobulin molecule.

[0215] An antibody as disclosed herein includes an antibody fragment, such as, but not limited to, Fab, Fab′ and F(ab′)2, Fd, single-chain Fvs (scFv), single-chain antibodies, disulfide-linked Fvs (sdfv) and fragments including either a VL or VH domain. In one embodiment, the targeting moiety is an antibody or scFv.

[0216] An antigen-binding antibody fragment, including single-chain antibody, may include the variable region(s) alone or in combination with the entirety or a portion of the following: hinge region, CH1, CH2, and CH3 domains. An antigen-binding fragment can also include any combination of variable region(s) with a hinge region, CHI, CH2, and CH3 domains. Also includes is a Fc fragment, antigen-Fc fusion proteins, and Fc-targeting moiety. The antibody may be from any animal origin including birds and mammals. In one aspect, the antibody is, or derived from, a human, murine (e.g., mouse and rat), donkey, sheep, rabbit, goat, guinea pig, camel, horse, or chicken. Further, such antibody may be a humanized version of an antibody. The antibody may be monospecific, bispecific, trispecific, or of greater multi specificity.

[0217] The intact antibody may have one or more “effector functions” which refer to those biological activities attributable to the Fc region (a native sequence Fc region or amino acid sequence variant Fc region or any other modified Fc region) of an antibody. Examples of antibody effector functions include Clq binding; complement dependent cytotoxicity; Fc receptor binding; antibody-dependent cell-mediated cytotoxicity (ADCC); phagocytosis; down regulation of cell surface receptors (e.g., B cell receptor (BCR); and cross-presentation of antigens by antigen presenting cells or dendritic cells. In one embodiment, the targeting antibody or Fc-containing fusion protein facilitates focused or preferential delivery of a immunomodulatory moiety to a target cell. In another aspect, a targeting antibody can induce death of the targeted cell or sensitize it to immune cell-mediated cytotoxicity. In another aspect, the Fc-fusion protein or antibody can facilitate delivery of the immunomodulatory moiety or immunogenic apoptotic material from antibody-bound tumor targets, or both, to an antigen presenting cells (APC) via interactions between their Fc and Fc receptors (on APC).

[0218] The Fc region may have one or more modifications to alter one or more of its biophysical and/or functional properties; for example, extend half-life, reduce effector function, or increase effector function. Such modifications are well-known in the art. Exemplary modifications include the “LALA” (L234A/L235A) mutation of IgG1, and the S228P mutation of IgG4.

[0219] The term “fragment” refers to any subject polypeptide having an amino acid residue sequence shorter than that of a polypeptide whose amino acid residue sequence is disclosed herein

[0220] In some embodiments, this targeting polypeptide binds a tumor-associated antigen or tumor antigen. In one embodiment, a “tumor-associated antigen” is a molecule whose expression is elevated on tumor cells. In one embodiment, the tumor-associated antigen is a growth factor receptor or a growth factor.

[0221] In one embodiment, the fusion protein of the invention comprises a targeting polypeptide that specifically binds a tumor-associated molecule. In some embodiments, the targeting polypeptide binds one of the following targets: CA125, CA19-9, CD30, CEACAM5, CEACAM1, CEACAM6, DLL3, DLL4, DPEP3, EGFR, EGFRvIII, GD2, HER2, HER3, HGF, IGF1R, IL13Ra2, LIV-1, LRRC15, MUC1, PRLR, PSCA, PSMA, PTK7, SEZ6, SLAMF7, TF, cMet, claudin, mesothelin, nectin4, uPAR, GPNMB, CD79b, CD22, NaPi2b, SLTRK6, STEAP1, MUC16, CD37, GCC, AGC-16, 5T4, CD70, TROP2, CD74, CD27L, Fra, CD138, CA6.

[0222] In various embodiments, the fusion protein of the invention comprises an antibody selected from the following: 41BB: urelumab (SEQ ID NOs: 1, 2); CA125: ab1 (SEQ ID NOs: 3, 4), sofituzumab (SEQ ID NOs: 5, 6); CA19-9: MVT-5873 (SEQ ID NOs: 7, 8); CD20: rituximab (SEQ ID NOs: 9, 10); CD30: brentuximab (SEQ ID NOs: 11, 12); CD33: gemtuzumab (SEQ ID NOs: 13, 14); CD38: daratumumab (SEQ ID NOs: 15, 16); CD39: IPH5201 (SEQ ID NOs: 17, 18); CD40: ABBV-428 (SEQ ID NOs: 19, 20); CD47: 5F9 (SEQ ID NOs: 21, 22); CD73: GS1423 (SEQ ID NOs: 23, 24); CEACAM5: labetuzumab (SEQ ID NOs: 25, 26); CTLA4: ipilimumab (SEQ ID NOs: 27, 28); DLL3: rovalpituzumab (SEQ ID NOs: 29, 30); DLL4: ABT-165 (SEQ ID NOs: 31, 32); DPEP3: ab1 (SEQ ID NOs: 33, 34), ab2 (SEQ ID NOs: 35, 34); EGFR: panitumumab (SEQ ID NOs: 36, 37), necitumumab (SEQ ID NOs: 38, 39), ABBV-321 (SEQ ID NOs: 40, 41), cetuximab (SEQ ID NOs: 42, 43); EGFRvIII: ab1 (SEQ ID NOs: 44, 45), depatuxizumab (SEQ ID NOs: 46, 47); GARP: ARGX-115 (SEQ ID NOs: 48, 49); GD2: dinutuximab (SEQ ID NOs: 50, 51); HER2: pertuzumab (SEQ ID NOs: 52, 53), trastuzumab (SEQ ID NOs: 54, 55); HGF: rilotumumab (SEQ ID NOs: 56, 57); ICOS: GSK3359609 (SEQ ID NOs: 58, 59); IL13Ra2: ab1 (SEQ ID NOs: 60, 61); IL17R: brodalumab (SEQ ID NOs: 62, 63); ILla: 3D12r16 (SEQ ID NOs: 64, 65); ILlb: E26.35 (SEQ ID NOs: 66, 67), canakinumab (SEQ ID NOs: 68, 69); IL23: brazikumab (SEQ ID NOs: 70, 71), guselkumab (SEQ ID NOs: 72, 73), risankizumab (SEQ ID NOs: 74, 75), tildrakizumab (SEQ ID NOs: 76, 77); IL6R: tocilizumab (SEQ ID NOs: 78, 79); LAP: 7H4 (SEQ ID NOs: 80, 81); LIV-1: ladiratuzumab (SEQ ID NOs: 82, 83); LRRC15: ABBV-085-huAD208.4.1 (SEQ ID NOs: 84, 85), ABBV-085-huM25 (SEQ ID NOs: 86, 87); MUC1: clivatuzumab (SEQ ID NOs: 88, 89); OX40: ABBV-368-Hu3726 (SEQ ID NOs: 90, 91), ABBV-368-Hu3739 (SEQ ID NOs: 92, 93), ABBV-368-Hu3741 (SEQ ID NOs: 94, 95), GSK3174998 (SEQ ID NOs: 96, 97); PD1: spartalizumab (SEQ ID NOs: 98, 99), pembrolizumab (SEQ ID NOs: 100, 101), ABBV-181 (SEQ ID NOs: 102, 103), nivolumab (SEQ ID NOs: 104, 105); PDGF: ab1 (SEQ ID NOs: 106, 107); PDL1: atezolizumab (SEQ ID NOs: 108, 109), avelumab (SEQ ID NOs: 110, 111), durvalumab (SEQ ID NOs: 112, 113); PRLR: ab1 (SEQ ID NOs: 114, 115); PSCA: ab1 (SEQ ID NOs: 116, 117); PSMA: ab2 (SEQ ID NOs: 118, 119), ab1 (SEQ ID NOs: 120, 121); PTK7: hSC6.24 (SEQ ID NOs: 122, 123); SEZ6: hSC17.200 (SEQ ID NOs: 124, 125); SLAMF7: elotuzumab (SEQ ID NOs: 126, 127); TF: tisotumab (SEQ ID NOs: 128, 129); TGFb: XOMA-089 (SEQ ID NOs: 130, 131), fresolimumab (SEQ ID NOs: 132, 133); TGFbRII: LY3022859 (SEQ ID NOs: 134, 135); TIGIT: etigilimab (SEQ ID NOs: 136, 137), tiragolumab (SEQ ID NOs: 138, 139); TIM3: M6903 (SEQ ID NOs: 140, 141); VEGF: ranibizumab (SEQ ID NOs: 142, 143), bevacizumab (SEQ ID NOs: 144, 32), ABT-165 (SEQ ID NOs: 145, 146), ab1 (SEQ ID NOs: 144, 32); VEGFR: ramucirumab (SEQ ID NOs: 147, 148); VISTA: onvatilimab (SEQ ID NOs: 149, 150); cMet: telisotuzumab (SEQ ID NOs: 151, 152); claudin: hSC27.1 (SEQ ID NOs: 153, 154); gp120: B12 (SEQ ID NOs: 155, 156); mesothelin: ABBV-428 (SEQ ID NOs: 157, 158); nectin4: enfortumab (SEQ ID NOs: 159, 160); uPAR: ab1 (SEQ ID NOs: 161, 162), ab2 (SEQ ID NOs: 163, 164).

[0223] In one embodiment, the targeting polypeptide specifically binds human epidermal growth factor receptor 2 (HER2; ErbB2). HER2 is overexpressed in many human cancers, including breast cancer and gastric cancer. In HER2-overexpressing cells, excess levels of HER2 expression can result in spontaneous and constitutive ligand-independent dimerization with subsequent activation of the cytoplasmic kinase region. HER2 can additionally heterodimerize with HER3 and EGFR. Each of these interactions leads to kinase signaling that stimulates phosphorylation and downstream signaling, primarily through the PI3K-Akt-mTOR and Ras-Raf-MEK-Erk pathways. Activation of these pathways promotes proliferation, evasion of apoptosis, angiogenesis, and invasion, leading to tumor growth and progression. anti-HER2 antibody (trastuzumab) inhibits homodimerization and autophosphorylation of HER2, as well as heterodimerization of HER2 with EGFR. anti-HER2 antibody (pertuzumab) interrupts the HER2/HER3 interaction or downstream signaling of the HER2/HER3 heterodimer in complex with HER3 ligand (heregulin). In some embodiments, the antibody of the ALT that binds HER2 is selected from one of the following: pertuzumab (SEQ ID NOS. 52, 53); trastuzumab (SEQ ID NOS. 54, 55). In one aspect, the HER2 targeted antibody is conjugated to a cytotoxic agent (anti-HER2-ADC), such as ado-trastuzumab (Trastuzumab-DM1). In various embodiments, the fusion protein of the invention comprises an antibody that targets and inhibits HER2 fused to one or more receptor ECDs.

[0224] In one embodiment, the targeting polypeptide specifically binds epidermal growth factor receptor (EGFR). In epithelial tumors, the epidermal growth factor receptor (EGFR) controls key signaling pathways responsible for growth, proliferation, migration, and survival of tumor cells. The epidermal growth factor receptor variant III (EGFRvIII) is the most common EGFR mutation that occurs frequently in high-grade gliomas especially glioblastoma multiforme (GBM). EGFRvIII arises from the deletion of exon 2-7 that leads to the formation of the constitutively activated mutant receptor incapable of binding any known ligand. EGFRvIII-expressing cells are resistant to EGFR inhibitors, and EGFRvIII expression in tumors is often correlates with poor prognosis. The presence of the unique glycine site in EGFRvIII provides an option to develop EGFRvIII-specific monoclonal antibodies. Examples of antibodies targeting EGFRvIII include depatuxizumab. Examples of EGFR antibodies include cetuximab, panitumumab, and necitumumab. In some embodiments, the antibody of the ALT that binds EGFR is selected from one of the following: panitumumab (SEQ ID NOS. 36, 37); necitumumab (SEQ ID NOS. 38, 39); ABBV-321 (SEQ ID NOS. 40, 41); cetuximab (SEQ ID NOS. 42, 43). In various embodiments, the fusion protein of the invention comprises a polypeptide that targets and inhibits EGFR or EGFRvIII fused to one or more receptor ECDs.

[0225] In one embodiment, the targeting polypeptide specifically binds Prostate-specifc membrane antigen (PSMA). PSMA is a non-soluble type 2 integral membrane protein. It is weakly expressed in normal prostate tissue but strongly upregulated in prostate cancer. It is also expressed in the neovasculature of numerous solid malignancies. PSMA overexpression is associated with higher Prostate Cancer grade and androgen deprivation, further increasing in metastatic disease and castration resistant Prostate Cancer. In one embodiment, the ALT specifically binds an epitope of PSMA necessary for its functional activity, such as PI3K activation. In some embodiments, the antibody of the ALT that binds PSMA is selected from one of the following: ab2 (SEQ ID NOS. 118, 119); ab1 (SEQ ID NOS. 120, 121). In one aspect, the PSMA targeted antibody is conjugated to a cytotoxic agent (anti-PSMA-ADC). In various embodiments, the fusion protein of the invention comprises a polypeptide that targets and binds PSMA fused to one or more receptor ECDs.

[0226] In one embodiment, the targeting polypeptide specifically binds the urokinase-type plasminogen activator receptor (uPAR). uPAR is a GPI-anchored cell membrane receptor, composed by three homologous domains (DI, DII, DIII). Its main function is focusing of urokinase (uPA) proteolytic activity, responsible for degradation of extracellular matrix (ECM) components, on the cell surface. When uPA binds uPAR, it consequently converts plasminogen to active plasmin, which activates several proteases related to the degradation of extracellular matrix proteins and basal membranes, thereby facilitating cancer cell invasion and metastasis. uPAR expression is increased in many human cancers and correlates with a poor prognosis and early invasion and metastasis. uPAR is an adhesion receptor, as it binds vitronectin (VN), an abundant component of provisional extracellular matrix (ECM). This direct interaction between uPAR and VN is critical for triggering changes in cell morphology, migration and signaling and is an important requirement for the induction of epithelial mesenchymal transition (EMT). In some embodiments, the antibody of the ALT specifically inhibits the uPA/uPAR interaction. In other embodiments, the ALT specifically inhibits the vitronectin/uPAR interaction. In one aspect the antibody binds a sequence or domain of uPAR that remains on the cell surface following cleavage. In some embodiments, the antibody of the ALT that binds uPAR is selected from one of the following: ab1 (SEQ ID NOS. 161, 162); ab2 (SEQ ID NOS. 163, 164). In one aspect, the uPAR targeted antibody is conjugated to a cytotoxic agent (anti-uPAR-ADC). In various embodiments, the fusion protein of the invention comprises a polypeptide that targets and binds uPAR, fused to one or more receptor ECDs.

[0227] In some embodiments, the targeting polypeptide binds an antigen overexpressed by a hematologic malignancy. In some embodiments, the targeting polypeptide binds an antigen overexpressed by multiple myeloma. In some embodiments, the targeting polypeptide binds CD38, SLAMF7, or BCMA. In some embodiments, the targeting polypeptide is an antibody selected from the following list: MEDI2228; CC-99712; belantamab; Gemtuzumab (anti-CD33 mAb). In some embodiments, the targeting polypeptide binds an antigen overexpressed by Non-Hodgkin's B cell lymphomas. In some embodiments, the antibody binds CD20. In some embodiments, the targeting polypeptide binds rituximab (chimeric murine/human anti-CD20 mAb); Obinutuzumab (anti-CD20 mAb); Ofatumumab (anti-CD20 mAb); Tositumumab-I131 (anti-CD20 mAb); Ibritumomab tiuxetan (anti-CD20 mAb). In some embodiments, the targeting polypeptide binds CD19. In some embodiments, the targeting polypeptide binds an antigen overexpressed by Hodgkin's lymphomas. In some embodiments, the antibody binds CD30, or CD22. In some embodiments, the targeting polypeptide binds an antigen overexpressed by leukemia. In some embodiments, the ALT binds CD33.

[0228] T cell activation begins with the recognition of an antigenic peptide in the context of a major histocompatibility complex (MHC) on an antigen-presenting cell by the T cell receptor (TCR). The process of T cell activation is mediated by a number of signaling proteins through inducible phosphorylation, enzyme activation and protein-protein and protein-lipid interactions. T cells require two signals to become fully activated. A first signal, which is antigen-specific, is provided through the T cell receptor (TCR) which interacts with peptide-MHC molecules on the membrane of antigen presenting cells (APC). A second signal, the co-stimulatory signal, is antigen nonspecific and is provided by the interaction between co-stimulatory molecules expressed on the membrane of APC and the T cell. T cell co-stimulation is necessary for T cell proliferation, differentiation and survival. Activation of T cells without co-stimulation may lead to T cell anergy, T cell deletion or the development of immune tolerance.

[0229] The best characterized T cell co-stimulatory molecules expressed by T cells is CD28 which interacts with CD80 (B7.1) and CD86 (B7.2) on the membrane of APC. Other costimulatory receptors expressed by T cells include 4-1BB (receptor for 4-1BB ligand), ICOS (Inducible Costimulator) (receptor for ICOS-L), OX40 (receptor for OX40 ligand), GITR (receptor for GITR ligand), CD27 (interacts with CD70), CD40L/CD40, HVEM (interacts with LIGHT), CD226 (interacts with CD155).

[0230] The activation signals are modulated by a family of receptors termed, T cell co-inhibitory receptors that include CTLA-4, PD-1, LAG-3, TIM-3, CEACAM-1, TIGIT, CD96, BTLA, CD160, VISTA, VSIG8, LAIR. Co-inhibitory receptors modulate signaling by utilizing mechanisms such as ectodomain competition with counter receptors and by the use of intracellular mediators such as protein phosphatases. Co-inhibitory receptors can act as threshold-setters, modulators, checkpoints and feedback mechanisms that can fine tune the quality and magnitude of the T cell immune response.

[0231] Receptors that are inhibitory to T cell function are termed T cell co-inhibitory receptors. Inhibitory receptors attenuate and counterbalance activation signals initiated by stimulatory receptors. The subsequent outcomes on T cell function can range from temporary inhibition to permanent inactivation and cell death. TCR signaling can be controlled by various mechanisms that differ in their time of action and/or target molecule. Negative regulatory mechanisms are in place to act before T cell activation to maintain its quiescent state.

[0232] The majority of T cell co-inhibitory receptors belong to the immunoglobulin (Ig) superfamily. One mechanism involves the sequestration of the ligands for co-stimulatory receptors, depriving the T cell from receiving activation signals necessary for complete activation. The second mechanism involves the recruitment of intracellular phosphatases by an immunoreceptor tyrosine-based inhibition motif (ITIM) and/or an immunoreceptor tyrosine-based switch motif (ITSM) that make up the cytoplasmic tail of certain inhibitory receptors, which dephosphorylate signalling molecules downstream of the TCR and co-stimulatory pathways, leading to a quantitative reduction in activation-induced gene expression. The third mechanism involves the upregulation (or downregulation) of genes that code for proteins involved in the inhibition of immune functions. A co-inhibitory receptor could use a combination of the above and possibly other yet to be discovered mechanisms to regulate T cell signaling.

[0233] T cell co-inhibitory receptors are transmembrane glycoproteins that transmit dominant negative signals mainly via intracellular phosphatases that bind to phosphorylated tyrosine residues in the cytoplasmic domain. T cell co-inhibitory receptors can act as safety mechanisms and threshold setters to prevent uncontrolled detrimental extremes of reactivity by counteracting the stimulatory signals.

[0234] In one embodiment, the fusion protein of the invention comprises a targeting polypeptide that specifically binds a T cell co-inhibitory receptor (TCIR), a T cell co-inhibitory receptor ligand (TCIR ligand), a T-cell co-inhibitory molecule, or a T cell co-stimulatory molecule. In an additional aspect, the antibody is an antagonist of a TCIR, TCIR ligand, or T cell co-inhibitory molecule. In an additional aspect, the targeting moiety polypeptide specifically binds one or more of the following molecules: Cytotoxic T lymphocyte associated antigen-4 (CTLA-4, CD152), Programmed Death-1 protein (PD-1), Programmed death ligand-1 (PD-L1), Programmed death ligand (PD-L2), B7-H3 (CD276), T-cell immunoglobulin and mucin-domain containing-3 (TIM-3), Carcinoembryonic antigen-related cell adhesion molecule (CEACAM), V domain Ig suppressor of T cell activation (VISTA), V-set and immunoglobulin domain containing 8 (VSIG8), B and T lymphocyte attenuator (BTLA), Herpesvirus Entry Mediator (HVEM), CD160, T cell Ig and ITIM domain (TIGIT), CD226, CD96, Lymphocyte activation gene-3 (LAG-3).

[0235] In another aspect, the targeting polypeptide is an agonist of a T cell co-stimulatory molecule. In one aspect, the targeting polypeptide is an antibody that binds a T cell co-stimulatory molecule as an agonist. In another aspect, the targeting polypeptide is the extracellular domain of a native agonist ligand of a T cell co-stimulatory molecule. In an additional aspect, the targeting polypeptide specifically binds one of the following molecules: 4-1BB (CD137), Inducible T-Cell Costimulator (ICOS), OX-40 (CD134), glucocorticoid-induced TNFR-related protein (GITR), CD40, DNAM, CD30, or CD27. In various embodiments, an ALT of the invention comprises an antibody that binds a T cell co-inhibitory molecule or a T cell co-stimulatory molecule, wherein the said antibody is fused with one or more receptor ECDs.

[0236] In one embodiment, the fusion protein of the invention comprises a targeting polypeptide that specifically binds a “don't eat me” or anti-phagocytic ligand or receptor that inhibits the function of macrophages, dendritic cells, or other innate immune cells. Anti-phagocytic ligands expressed by cells bind their cognate receptor on a macrophage, dendritic cell, or other innate immune cell to inhibit phagocytosis. Tumor cells take advantage of this anti-phagocytic mechanism and overexpress “don't eat me” ligands in order to inhibit innate immune cell antitumor activity. In some embodiments, the targeting polypeptide binds CD47, SIRPa, CD31, CD24, SIGLEC10, or LILRB1.

[0237] In another aspect, the targeting polypeptide binds and disables the interaction of CD47 and SIRPa. CD47 is a “don't eat me signal” expressed by tumor cells that binds SIRPa on macrophages and induces SHP1/SHP2-mediated inhibition of macrophage phagocytosis. In various embodiments, an ALT of the invention comprises an antibody that binds and disables CD47, wherein the said antibody is fused with one or more receptor ECDs. In another aspect, the targeting polypeptide binds and disables a different “don't eat me” interaction—for example, LILRB1/MHC, SIGLEC10/CD24, or CD31/CD31. In various embodiments, the targeting polypeptide is an antibody that binds one of these targets.

[0238] In one embodiment, the targeting polypeptide comprises a polypeptide or antibody that specifically binds Programmed death-1 (PD-1; CD279) or Programmed death-1 ligands [PD-L1 (B7-H1); PD-L2 (B7-H4)]. Tumor cells express PD-1 ligands which inhibit T cell effector function and induce T cell exhaustion/apoptosis via engagement of PD-1. In one embodiment, the ALT comprises an antibody that specifically binds PD-1 and disrupts its interaction with PD-L1 or PD-L2. In one embodiment, the ALT comprises an antibody that specifically binds PD-L1 and disrupts its interaction with either PD-1 or B7: atezolizumab (SEQ ID NOS. 108, 109); avelumab (SEQ ID NOS. 110, 111); durvalumab (SEQ ID NOS. 112, 113). In another embodiment, the ALT comprises an antibody that specifically binds PD-1: spartalizumab (SEQ ID NOS. 98, 99); pembrolizumab (SEQ ID NOS. 100, 101); ABBV-181 (SEQ ID NOS. 102, 103); nivolumab (SEQ ID NOS. 104, 105).

[0239] In one embodiment, the invention comprises fusion proteins comprising targeting polypeptides wherein the targeting polypeptide is an antibody fused to one or more ECDs. In one aspect, the targeting polypeptide is an antibody-drug conjugate (ADC). In one aspect, the antibody is conjugated to one or more cytotoxic agents. In some embodiments, the cytotoxic agent causes immunogenic cell death. In some embodiments, the cytotoxic agent causes genotoxic cell death.

[0240] In some embodiments, the drug conjugate is selected from: mitotic inhibitors, antitumor antibiotics, immunomodulating agents, vectors for gene therapy, alkylating agents, antiangiogenic agents, antimetabolites, boron-containing agents, chemoprotective agents, hormones, antihormone agents, corticosteroids, photoactive therapeutic agents, oligonucleotides, radionuclide agents, topoisomerase inhibitors, tyrosine kinase inhibitors, and radiosensitizers.

[0241] The cytotoxic agent conjugated to the targeting polypeptide antibody may be any agent that induces cell death. In various embodiments, the cytotoxic agent may be selected from, but is not limited to, the following list: (1) maytansinoid (DM1), (2) calcheamicin, (3) auristatin (e.g., monomethyl auristatin E (MMAE) or monomethyl auristatin F (MMAF)).

[0242] In some embodiments, the cytotoxic agent may be conjugated to cysteines. In other embodiments, the cytotoxic agent may be conjugated to lysines. In some embodiments, the cytotoxic agent may be conjugated via a cleavable linker. In some embodiments, the cytotoxic agent may be conjugated via a non-cleavable linker. In various embodiments, the cytotoxic agent may be linked to the targeting polypeptide antibody via a linker, which may be selected from, but is not limited to, the following list: (1) hydrazone, (2) SMCC (maleimide), (3) valine-citrulline, (4) 4AP, (5) maleimidocaproyl (mc), (6) maleimidomethyl cyclohexane-1-carboxylate (mcc). The linker may further comprise one or more spacers. In some embodiments, the spacer may be selected from thiol-reactive maleimidocaproyl spacer and p-amino-benzyloxycarbonyl spacer. In one embodiment, the cleavable linker is maleimidocaproyl-valyl-citrullinyl-p-aminobenzyloxycarbonyl (mc-val-cit-PABC).

[0243] In one embodiment, a tumor-targeted antibody is fused to one or more receptor extracellular domains and conjugated to one or more cytotoxic agents. In one embodiment, a fusion protein comprises a targeting polypeptide wherein the targeting polypeptide is an antibody-drug conjugate and the targeting polypeptide is fused to a ligand-binding sequence of a receptor ECD. In one aspect, the receptor ECD is fused to the heavy chain of the targeting polypeptide. In another aspect, the receptor ECD is fused to the light chain of the targeting polypeptide.

[0244] In one embodiment, a fusion protein comprises a targeting polypeptide wherein the targeting polypeptide is an antibody-drug conjugate and the targeting polypeptide is fused to a ligand-binding sequence of TGFbRII ECD, or a fragment thereof. In one embodiment, a fusion protein comprises a targeting polypeptide wherein the targeting polypeptide is an antibody-drug conjugate and the targeting polypeptide is fused to a ligand-binding sequence of PD1 ECD, or a fragment thereof. In one embodiment, a fusion protein comprises a targeting polypeptide wherein the targeting polypeptide is an antibody-drug conjugate and the targeting polypeptide is fused to a ligand-binding sequence of BTLA ECD, or a fragment thereof. In one embodiment, a fusion protein comprises a targeting polypeptide wherein the targeting polypeptide is an antibody-drug conjugate and the targeting polypeptide is fused to a ligand-binding sequence of TIM-3 ECD, or a fragment thereof. In one embodiment, a fusion protein comprises a targeting polypeptide wherein the targeting polypeptide is an antibody-drug conjugate and the targeting polypeptide is fused to a ligand-binding sequence of SIRPa ECD, or a fragment thereof. In one embodiment, a fusion protein comprises a targeting polypeptide wherein the targeting polypeptide is an antibody-drug conjugate and the targeting polypeptide is fused to a ligand-binding sequence of SIGLEC10 ECD, or a fragment thereof. In one embodiment, a fusion protein comprises a targeting polypeptide wherein the targeting polypeptide is an antibody-drug conjugate and the targeting polypeptide is fused to a ligand-binding sequence of VEGFR ECD, or a fragment thereof.

[0245] In various embodiments, the targeting polypeptide is an antibody-drug conjugate selected from: gemtuzumab ozogamicin, brentuximab vedotin, trastuzumab emtansine, inotuzumab ozogamicin, polatuzumab vedotin, enfortumab vedotin, trastuzumab deruxtecan, or sacituzumab govitecan.

[0246] In one embodiment, the fusion protein comprises anti-nectin-4 antibody fused to TGFbRII on the C-terminus of the heavy chain; and MMAE is conjugated to the antibody via a protease cleavable linker comprising maleimidocaproyl, valine-citrulline, and PABC. In one aspect, this fusion protein is anti-nectin4-TGFbRII (e.g., SEQ ID NOs: 265, 160). In one embodiment, the fusion protein comprises anti-nectin-4 antibody fused to BTLA on the C-terminus of the heavy chain; and MMAE is conjugated to the antibody via a protease cleavable linker comprising maleimidocaproyl, valine-citrulline, and PABC. In one aspect, this fusion protein is anti-nectin4-BTLA (e.g., SEQ ID NOs: 256, 160). In one embodiment, the fusion protein comprises anti-nectin-4 antibody fused to SIRPa on the C-terminus of the heavy chain; and MMAE is conjugated to the antibody via a protease cleavable linker comprising maleimidocaproyl, valine-citrulline, and PABC. In one aspect, this fusion protein is anti-nectin4-SIRPa (e.g., SEQ ID NOs: 264, 160). In one embodiment, the fusion protein comprises anti-nectin-4 antibody fused to PD1 on the C-terminus of the heavy chain; and MMAE is conjugated to the antibody via a protease cleavable linker comprising maleimidocaproyl, valine-citrulline, and PABC. In one aspect, this fusion protein is anti-nectin4-PD1 (e.g., SEQ ID NOs: 261, 160). In one embodiment, the fusion protein comprises anti-nectin-4 antibody fused to TIM3 on the C-terminus of the heavy chain; and MMAE is conjugated to the antibody via a protease cleavable linker comprising maleimidocaproyl, valine-citrulline, and PABC. In one aspect, this fusion protein is anti-nectin4-TIM3 (e.g., SEQ ID NOs: 266, 160). In one embodiment, the fusion protein comprises anti-nectin-4 antibody fused to SIGLEC10 on the C-terminus of the heavy chain; and MMAE is conjugated to the antibody via a protease cleavable linker comprising maleimidocaproyl, valine-citrulline, and PABC. In one aspect, this fusion protein is anti-nectin4-SIGLEC10 (e.g., SEQ ID NOs: 263, 160).

[0247] In one embodiment, the fusion protein comprises anti-HER2 antibody fused to TGFbRII on the C-terminus of the heavy chain; and DM1 is conjugated to the antibody via a linker comprising mcc. In one aspect, this fusion protein is anti-HER2-TGFbRII (e.g., SEQ ID NOs: 253, 55). In one embodiment, the fusion protein comprises anti-HER2 antibody fused to BTLA on the C-terminus of the heavy chain; and DM1 is conjugated to the antibody via a linker comprising mcc. In one aspect, this fusion protein is anti-HER2-BTLA (e.g., SEQ ID NOs: 244, 55). In one embodiment, the fusion protein comprises anti-HER2 antibody fused to TIM-3 on the C-terminus of the heavy chain; and DM1 is conjugated to the antibody via a linker comprising mcc. In one aspect, this fusion protein is anti-HER2-TIM3 (e.g., SEQ ID NOs: 254, 55). In one embodiment, the fusion protein comprises anti-HER2 antibody fused to PD1 on the C-terminus of the heavy chain; and DM1 is conjugated to the antibody via a linker comprising mcc. In one aspect, this fusion protein is anti-HER2-PD1 (e.g., SEQ ID NOs: 249, 55). In one embodiment, the fusion protein comprises anti-HER2 antibody fused to SIRPa on the C-terminus of the heavy chain; and DM1 is conjugated to the antibody via a linker comprising mcc. In one aspect, this fusion protein is anti-HER2-SIRPa (e.g., SEQ ID NOs: 252, 55). In one embodiment, the fusion protein comprises anti-HER2 antibody fused to SIGLEC10 on the C-terminus of the heavy chain; and DM1 is conjugated to the antibody via a linker comprising mcc. In one aspect, this fusion protein is anti-HER2-SIGLEC10 (e.g., SEQ ID NOs: 251, 55). In one embodiment, the fusion protein comprises anti-HER2 antibody fused to VEGFR on the C-terminus of the heavy chain; and DM1 is conjugated to the antibody via a linker comprising mcc. In one aspect, this fusion protein is anti-HER2-VEGFR (e.g., SEQ ID NOs: 255, 55).

[0248] In one embodiment, the fusion protein comprising a tumor-targeted antibody and one or more ECDs is expressed using recombinant methods well-known in the art, and then a conjugation procedure well-known in the art is applied to attach the cytotoxic agent to the fusion protein. In some embodiments, the cytotoxic agent may be conjugated to the fusion protein using cysteine-specific conjugation methods well-known in the art. In other embodiments, the cytotoxic agent may be conjugated to the fusion protein using lysine-specific conjugation methods well-known in the art. In other embodiments, the cytotoxic agent may be conjugated to the fusion protein in a site-specific manner well-known in the art. In some embodiments, this may be achieved via HIPS ligation (Hydrazinyl-Iso-Pictet-Spengler (HIPS) ligation to formylglycine), trapped Knoevenagel condensation, or tandem Knoevenagel condensation-Michael Addition (TKM) ligation.

[0249] In various embodiments, the fusion proteins of the invention counteract VEGF in the tumor microenvironment. In some embodiments, the fusion proteins comprise a ligand-binding sequence of an extracellular domain of VEGFR (e.g., VEGFR ECD).

[0250] In one aspect, the fusion proteins of the invention comprise an antibody that targets a tumor antigen or tumor-associated antigen expressed in the TME, wherein said antibody is fused to a VEGF-binding sequence from one or more extracellular domains of VEGFR (e.g. VEGFR1ECD and/or VEGFR2ECD). In one example, the ALT comprises vascular endothelial growth factor (VEGF) binding portions from the extracellular domains of human VEGF receptors 1 and 2. The VEGFR ECD fused to the ALT localizes to the TME, where it serves as a decoy receptor to bind and disable VEGF (e.g VEGF-A, VEGF-B). In another aspect an ALT comprising a fused ligand-binding sequence of VEGFR ECD is additionally fused to a different receptor ECD that captures and disables its cognate ligands (e.g. TGFbRII ECD, PD-1ECD, TIM-3ECD, SIRPa ECD, BTLA ECD). In one aspect, the VEGFR ECD is fused to the C-terminus of the heavy chain of the targeting antibody, and another different receptor ECD is fused to the C-terminus of the light chain.

[0251] In other embodiments, the fusion proteins of the invention comprise a targeting polypeptide that binds VEGF or VEGFR fused to one or more receptor ECDs. These receptor ECDs are preferably selected from the following: PD1 ECD, TIM-3 ECD, TGFbRII ECD, BTLA ECD, SIRPa ECD, SIGLEC10 ECD. In some embodiments, the targeting polypeptide that binds VEGF or VEGFR is an antibody.

[0252] In another aspect, the ALT is a polypeptide comprising an antibody that targets VEGF or VEGFR, wherein said antibody is fused to a ligand-binding sequence of an extracellular domain of a receptor. In one example, the ALT comprises an antibody that targets either VEGF or VEGFR, wherein said antibody is fused to a TGFb-binding sequence of an extracellular domain of the TGFbR (e.g. TGFbRII ECD). In another example, the ALT comprises an antibody that targets either VEGF or VEGFR, wherein said antibody is fused to a PD-1 ligand-binding sequence of an extracellular domain of PD-1 (PD-1ECD). In another example, the ALT comprises an antibody that targets either VEGF or VEGFR, wherein said antibody is fused to a TIM-3 ligand-binding sequence of an extracellular domain of TIM-3 (TIM-3ECD). In another example, the ALT comprises an antibody that targets either VEGF or VEGFR, wherein said antibody is fused to a CD47-binding sequence of an extracellular domain of SIRPa (e.g. SIRPa ECD). In another example, the ALT comprises an antibody that targets either VEGF or VEGFR, wherein said antibody is fused to a HVEM-binding sequence of an extracellular domain of BTLA (e.g. BTLA ECD). In another aspect an ALT comprises an antibody that targets either VEGF or VEGFR, wherein said antibody is fused to a ligand-binding sequence of a specific receptor ECD (receptor ECD-1), and additionally fused to a ligand-binding sequence of another different receptor ECD (receptor ECD-2). In various examples, receptor ECD-1 and receptor ECD-2 may be selected from a group comprising TGFbRII ECD, PD-1ECD, TIM-3ECD, BTLA ECD and SIRPa ECD. In one aspect, the receptor ECD-1 sequence is fused to the C-terminus of the heavy chain of the targeting antibody, and another different receptor ECD-2 sequence is fused to the C-terminus of the light chain. In one aspect, the receptor ECD (that is fused to a VEGF or VEGFR1 targeting antibody) binds to a cognate ligand expressed in the TME, thereby localizing the ALT and consequent VEGF/VEGFR blockade to the TME. In one example, a PD-1ECD binds PD-L1 or PD-L2 expressed on tumor cells or the TME. In another example, a TIM-3ECD binds CEACAM-1 or CEACAM-5 or CEACAM-6 expressed on tumor cells or the TME. In another example, a SIRPa ECD binds CD47 expressed on tumor cells or the TME. In another example, a BTLA ECD binds HVEM expressed on tumor cells or the TME.

[0253] Examples of such ALTs that capture and disable VEGF or block VEGFR signaling in the TME include, but are not limited to the following: ALTs comprising an antibody fused to VEGFR ECD (with or without another receptor ECD fused to the same antibody); ALTs where the antibody binds VEGF, fused to one or more Receptor ECD(s); ALTs where the antibody binds VEGFR, fused to one or more Receptor ECD(s)

[0254] In one embodiment, the fusion proteins of the invention may comprise a ligand-binding sequence of an extracellular domain of Vascular endothelial growth factor receptor (VEGFR1 and/or VEGFR2) to bind and disable VEGF.

[0255] In some embodiments, fusion proteins of the invention comprise VEGFR ECD and a polypeptide that inhibits CD47/SIRPa. Although CD47 targeted antibodies can promote antitumor immune responses by inhibiting the interaction of CD47 with SIRPa, its antitumor efficacy may be limited by disruption of TSP-1/CD47-dependent inhibition of VEGF and angiogenesis. In one embodiment, the ALT is a polypeptide comprising an antibody that targets CD47, wherein said antibody is fused to a VEGFR ECD. In this aspect, the ALT promotes antitumor immunity by disrupting the interaction of CD47 with SIRPa, while simultaneously counteracting VEGF-mediated tumor angiogenesis. In another aspect, the ALT comprises a VEGF-binding sequence from VEGFR ECD and a CD47-binding sequence from one or more extracellular domains of SIRPa (SIRPa ECD).

[0256] In some embodiments, the fusion protein comprises VEGFR ECD and a polypeptide that inhibits the interaction between CD47 and SIRPa. In one embodiment, this fusion protein comprises VEGFR ECD and a polypeptide that binds CD47. In one embodiment, this fusion protein is anti-CD47 mAb fused to VEGFR ECD (anti-CD47-VEGFR (e.g., SEQ ID NOs: 392, 22)). In another embodiment, this fusion protein comprises SIRPa ECD and VEGFR ECD. In one embodiment, this fusion protein is SIRPa-Fc-VEGFR (e.g., SEQ ID NO: 552) or VEGFR-Fc-SIRPa (e.g., SEQ ID NO: 568).

[0257] In a further aspect, the fusion protein comprises VEGFR ECD, a polypeptide that inhibits the interaction between CD47 and SIRPa, and another polypeptide that inhibits a T cell co-inhibitory molecule. In some embodiments, this fusion protein comprises anti-CD47 mAb with VEGFR ECD fused to the heavy chain; and a T cell co-inhibitory molecule ECD fused to the light chain. In a particular embodiment, this fusion protein is anti-CD47-VEGFR-PD1 (e.g., SEQ ID NOs: 392, 384).

[0258] In another aspect, the fusion protein comprises VEGFR ECD, SIRPa ECD, and an antibody with a heavy chain and light chain. In a preferred embodiment, the VEGFR ECD is fused to the heavy chain of the antibody and the SIRPa ECD is fused to the light chain of the antibody. In some embodiments, the antibody of said fusion protein binds a T cell co-inhibitory molecule as an antagonist. Exemplary embodiments of such fusion proteins include anti-CTLA4-VEGFR-SIRPa (e.g., SEQ ID NOs: 446, 438), anti-PD1-VEGFR-SIRPa (e.g., SEQ ID NOs: 458, 450), and anti-PDL1-VEGFR-SIRPa (e.g., SEQ ID NOs: 468, 461). In other embodiments, the antibody of said fusion protein binds a T cell co-stimulatory molecule as an agonist. Exemplary embodiments of this fusion protein include anti-OX40-VEGFR-SIRPa (e.g., SEQ ID NOs: 516, 508), anti-41BB-VEGFR-SIRPa (e.g., SEQ ID NOs: 504, 496), and anti-CD40-VEGFR-SIRPa. In other embodiments, the antibody of said fusion protein is a tumor-targeted antibody. In some embodiments, this tumor targeted-antibody binds a tumor growth factor or growth factor receptor. In other embodiments, this tumor targeted antibody binds a tumor cell surface molecule. Exemplary embodiments of this fusion protein include anti-EGFR-VEGFR-SIRPa (e.g., SEQ ID NOs: 231, 223), anti-HER2-VEGFR-SIRPa (e.g., SEQ ID NOs: 255, 247), anti-EGFRvIII-VEGFR-SIRPa (e.g., SEQ ID NOs: 243, 235), anti-uPAR-VEGFR-SIRPa, and anti-PSMA-VEGFR-SIRPa.

[0259] In other embodiments, the antibody of said fusion protein binds a member of the TGFb pathway. In some embodiments, this antibody binds TGFb, TGFbR, or GARP. Exemplary embodiments of this fusion protein include anti-TGFb-VEGFR-SIRPa (e.g., SEQ ID NOs: 403, 396), anti-TGFbR-VEGFR-SIRPa, and anti-GARP-VEGFR-SIRPa.

[0260] In some embodiments, the fusion protein comprises VEGFR ECD and a polypeptide that inhibits a T cell co-inhibitory molecule. In specific embodiments, the fusion protein comprises VEGFR ECD and an antibody that binds and disables a T cell co-inhibitory molecule.

[0261] In some embodiments, the fusion protein comprises VEGFR ECD and a polypeptide that inhibits the interaction of TIGIT or PVRIG with PVRL2 or PVR. In some embodiments, this fusion protein comprises an antibody that binds TIGIT or PVRIG fused to VEGFR ECD. Exemplary embodiments of this fusion protein include anti-TIGIT-VEGFR (e.g., SEQ ID NOs: 480, 139) and anti-PVRIG-VEGFR.

[0262] In some embodiments, the fusion protein comprises VEGFR ECD and a polypeptide that inhibits the interaction of VISTA and VSIG8. In some embodiments, this fusion protein comprises an antibody that binds VISTA or VSIG8 fused to VEGFR ECD. Exemplary embodiments of this fusion protein include anti-VISTA-VEGFR and anti-VSIG8-VEGFR.

[0263] In some embodiments, the fusion protein comprises VEGFR ECD and a polypeptide that inhibits the interaction of PD-1 and PD-L1. In some embodiments, this fusion protein comprises an antibody that binds PD-1 or PD-L1 fused to VEGFR ECD. Exemplary embodiments of this fusion protein include anti-PD1-VEGFR (e.g., SEQ ID NOs: 458, 101) and anti-PDLL-VEGFR (e.g., SEQ ID NOs: 468, 109).

[0264] In some embodiments, the fusion protein comprises VEGFR ECD and a polypeptide that inhibits CTLA-4. In some embodiments, this fusion protein comprises an antibody that binds CTLA-4 fused to VEGFR ECD. Exemplary embodiments of this fusion protein include anti-CTLA4-VEGFR (e.g., SEQ ID NOs: 446, 28).

[0265] In some embodiments, the fusion protein comprises VEGFR ECD, an antibody that binds and disables a T cell co-inhibitory molecule, and an additional receptor ECD. In one aspect, the VEGFR ECD is fused to the heavy chain of the antibody and the additional receptor ECD is fused to the light chain of the antibody. Alternatively, the VEGFR ECD is fused to the light chain and the additional receptor ECD is fused to the heavy chain.

[0266] In some embodiments, the fusion protein comprises VEGFR ECD, an antibody that binds and disables a T cell co-inhibitory molecule, and PD1 ECD. Exemplary embodiments of this fusion protein include anti-CTLA4-VEGFR-PD1 (e.g., SEQ ID NOs: 446, 436); anti-PD1-VEGFR-PD1 (e.g., SEQ ID NOs: 458, 448); anti-TIGIT-VEGFR-PD1 (e.g., SEQ ID NOs: 480, 470); anti-TIM3-VEGFR-PD1 (e.g., SEQ ID NOs: 492, 482).

[0267] In other embodiments, the fusion protein comprises VEGFR ECD, an antibody that binds and disables a T cell co-inhibitory molecule, and SIRPa ECD. Exemplary embodiments of this fusion protein include anti-PDLL-VEGFR-SIRPa (e.g., SEQ ID NOs: 468, 461); anti-PD1-VEGFR-SIRPa (e.g., SEQ ID NOs: 458, 450); anti-CTLA4-VEGFR-SIRPa (e.g., SEQ ID NOs: 446, 438); anti-TIGIT-VEGFR-SIRPa (e.g., SEQ ID NOs: 480, 472); anti-TIM3-VEGFR-SIRPa (e.g., SEQ ID NOs: 492, 484).

[0268] In other embodiments, the fusion protein comprises VEGFR ECD, an antibody that binds and disables a T cell co-inhibitory molecule, and SIGLEC10 ECD. Exemplary embodiments of this fusion protein include anti-TIGIT-VEGFR-SIGLEC10 (e.g., SEQ ID NOs: 480, 471); anti-CTLA4-VEGFR-SIGLEC10 (e.g., SEQ ID NOs: 446, 437); anti-PD1-VEGFR-SIGLEC10 (e.g., SEQ ID NOs: 458, 449); anti-TIM3-VEGFR-SIGLEC10 (e.g., SEQ ID NOs: 492, 483); anti-PDL1-VEGFR-SIGLEC10 (e.g., SEQ ID NOs: 468, 460).

[0269] In some embodiments, the fusion protein comprises an antibody that binds a T cell co-stimulatory molecule fused to VEGFR. This antibody is preferably an agonist of the T cell co-stimulatory molecule. In some embodiments, this fusion protein is selected from: anti-OX40-VEGFR (e.g., SEQ ID NOs: 516, 97); anti-41BB-VEGFR (e.g., SEQ ID NOs: 504, 2); anti-ICOS-VEGFR (e.g., SEQ ID NOs: 528, 59).

[0270] In a further aspect, the fusion protein comprises an antibody that binds a T cell-costimulatory molecule, VEGFR ECD, and an additional receptor ECD. In a preferred embodiment, the VEGFR ECD is fused to the heavy chain of the antibody and the additional receptor ECD is fused to the light chain of the antibody. In some embodiments, the additional receptor ECD is the ECD of a T cell co-inhibitory molecule. In one embodiment, the T cell co-inhibitory molecule is PD-1. In some embodiments, the fusion protein is selected from: anti-41BB-VEGFR-PD1 (e.g., SEQ ID NOs: 504, 494); anti-OX40-VEGFR-PD1 (e.g., SEQ ID NOs: 516, 506); anti-ICOS-VEGFR-PD1 (e.g., SEQ ID NOs: 528, 518). In another aspect, the additional receptor ECD is SIRPa ECD. In some embodiments, the fusion protein is selected from: anti-41BB-VEGFR-SIRPa (e.g., SEQ ID NOs: 504, 496); anti-ICOS-VEGFR-SIRPa (e.g., SEQ ID NOs: 528, 520); anti-OX40-VEGFR-SIRPa (e.g., SEQ ID NOs: 516, 508). In another aspect, the additional receptor ECD is SIGLEC10 ECD. In some embodiments, the fusion protein is selected from: anti-OX40-VEGFR-SIGLEC10 (e.g., SEQ ID NOs: 516, 507); anti-41BB-VEGFR-SIGLEC10 (e.g., SEQ ID NOs: 504, 495); anti-ICOS-VEGFR-SIGLEC10 (e.g., SEQ ID NOs: 528, 519).

[0271] In some embodiments, the fusion protein comprises an antibody, VEGFR ECD, and the ECD of a T cell co-stimulatory molecule. In a preferred embodiment, the VEGFR ECD is fused to heavy chain and the ECD of a T cell co-stimulatory molecule fused to light chain. In some embodiments, the fusion protein comprises VEGFR ECD and one of the following: OX40L, 41BBL, ICOSL. Exemplary embodiments of these fusion proteins include the following: VEGFR-Fc-41BBL (e.g., SEQ ID NO: 631); VEGFR-Fc-ICOSL (e.g., SEQ ID NO: 641); VEGFR-Fc-OX40L (e.g., SEQ ID NO: 645) and 41BBL-Fc-VEGFR (e.g., SEQ ID NO: 632); OX40L-Fc-VEGFR (e.g., SEQ ID NO: 646); ICOSL-Fc-VEGFR (e.g., SEQ ID NO: 642).

[0272] In one embodiment, the fusion protein comprises VEGFR ECD and a polypeptide that binds an ectonucleotidase. In a preferred embodiment, the ectonucleotidase is either CD39 or CD73. In some embodiments, the fusion protein is an antibody that binds CD39 or CD73 fused to VEGFR ECD; for example: anti-CD39-VEGFR (e.g., SEQ ID NOs: 434, 18) or anti-CD73-VEGFR (e.g., SEQ ID NOs: 427, 24).

[0273] In some embodiments, the fusion protein comprises VEGFR ECD, an antibody that binds CD39 or CD73, and an additional receptor ECD. In a preferred embodiment, the VEGFR ECD is fused to the heavy chain of the antibody and the additional receptor ECD is fused to the light chain of the antibody. In some embodiments, the fusion protein is selected from the following: anti-CD73-VEGFR-SIRPa (e.g., SEQ ID NOs: 427, 419); anti-CD73-VEGFR-PD1 (e.g., SEQ ID NOs: 427, 417).

[0274] In some embodiments, the fusion protein comprises a tumor-targeted antibody and VEGFR ECD. In some embodiments, this tumor targeted-antibody binds a tumor growth factor or growth factor receptor. In other embodiments, this tumor targeted antibody binds a tumor cell surface molecule. In some embodiments, this fusion protein is selected from the following: anti-EGFR-VEGFR (e.g., SEQ ID NOs: 231, 43), anti-HER2-VEGFR (e.g., SEQ ID NOs: 255, 55), anti-EGFRvIII-VEGFR (e.g., SEQ ID NOs: 243, 47), anti-uPAR-VEGFR (e.g., SEQ ID NOs: 274, 162), anti-PSMA-VEGFR (e.g., SEQ ID NOs: 281, 121), anti-nectin-4-VEGFR.

[0275] In a further embodiment, the fusion protein comprises a tumor-targeted antibody, VEGFR ECD, and an additional receptor ECD. In a preferred embodiment, the VEGFR ECD is fused to the heavy chain of the antibody and the additional receptor ECD is fused to the light chain of the antibody. In some embodiments, the additional receptor ECD is the ECD of a T cell co-inhibitory molecule. In one embodiment, the T cell co-inhibitory molecule is PD-1. In some embodiments, the fusion protein is selected from: anti-EGFRvIII-VEGFR-PD1 (e.g., SEQ ID NOs: 243, 233); anti-HER2-VEGFR-PD1 (e.g., SEQ ID NOs: 255, 245); anti-EGFR-VEGFR-PD1 (e.g., SEQ ID NOs: 231, 221); anti-nectin4-VEGFR-PD1 (e.g., SEQ ID NOs: 267, 257). In another aspect, the additional receptor ECD is SIRPa ECD. In some embodiments, the fusion protein is selected from: anti-EGFR-VEGFR-SIRPa (e.g., SEQ ID NOs: 231, 223); anti-nectin4-VEGFR-SIRPa (e.g., SEQ ID NOs: 267, 259); anti-HER2-VEGFR-SIRPa (e.g., SEQ ID NOs: 255, 247); anti-EGFRvIII-VEGFR-SIRPa (e.g., SEQ ID NOs: 243, 235). In another aspect, the additional receptor ECD is SIGLEC10 ECD. In some embodiments, the fusion protein is selected from: anti-EGFR-VEGFR-SIGLEC10 (e.g., SEQ ID NOs: 231, 222); anti-EGFRvIII-VEGFR-SIGLEC10 (e.g., SEQ ID NOs: 243, 234); anti-HER2-VEGFR-SIGLEC10 (e.g., SEQ ID NOs: 255, 246); anti-nectin4-VEGFR-SIGLEC10 (e.g., SEQ ID NOs: 267, 258).

[0276] In some embodiments, the fusion protein comprises an antibody that binds IL-17 or IL-17R and VEGFR ECD. In some embodiments, this fusion protein is selected from the following: anti-IL17-VEGFR, anti-IL17R-VEGFR (e.g., SEQ ID NOs: 336, 63).

[0277] In a further embodiment, the fusion protein comprises an antibody that binds IL-17 or IL-17R, VEGFR ECD, and an additional receptor ECD. In one embodiment, VEGFR ECD is fused to the heavy chain of the antibody and the additional receptor ECD is fused to the light chain of the antibody. Alternatively, VEGFR ECD is fused to light chain and additional receptor ECD is fused to heavy chain. In some embodiments, the additional receptor ECD is the ECD of a T cell co-inhibitory molecule. In one embodiment, the T cell co-inhibitory molecule is PD-1. In some embodiments, the fusion protein is selected from: anti-IL17R-VEGFR-PD1 (e.g., SEQ ID NOs: 336, 326). In another aspect, the additional receptor ECD is SIRPa ECD. In some embodiments, the fusion protein is selected from: anti-IL17R-VEGFR-SIRPa (e.g., SEQ ID NOs: 336, 328). In another aspect, the additional receptor ECD is SIGLEC10 ECD. In some embodiments, the fusion protein is selected from: anti-IL17R-VEGFR-SIGLEC10 (e.g., SEQ ID NOs: 336, 327).

[0278] In some embodiments, the fusion protein comprises an antibody that binds IL-23 or IL-23R and VEGFR ECD. If the antibody binds IL-23, it is preferred that the antibody bind the p19 subunit of IL-23 that is not shared with IL-12. In some embodiments, this fusion protein is selected from the following: anti-IL23-VEGFR (e.g., SEQ ID NOs: 348, 75), anti-IL23R-VEGFR.

[0279] In a further embodiment, the fusion protein comprises an antibody that binds IL-23 or IL-23R, VEGFR ECD, and an additional receptor ECD. In one embodiment, VEGFR ECD is fused to the heavy chain of the antibody and the additional receptor ECD is fused to the light chain of the antibody. Alternatively, VEGFR ECD is fused to light chain and additional receptor ECD is fused to heavy chain. In some embodiments, the additional receptor ECD is the ECD of a T cell co-inhibitory molecule. In one embodiment, the T cell co-inhibitory molecule is PD-1. In some embodiments, the fusion protein is selected from: anti-IL23-VEGFR-PD1 (e.g., SEQ ID NOs: 348, 338). In another aspect, the additional receptor ECD is SIRPa ECD. In some embodiments, the fusion protein is selected from: anti-IL23-VEGFR-SIRPa (e.g., SEQ ID NOs: 348, 340). In another aspect, the additional receptor ECD is SIGLEC10 ECD. In some embodiments, the fusion protein is selected from: anti-IL23-VEGFR-SIGLEC10 (e.g., SEQ ID NOs: 348, 339).

[0280] In some embodiments, the fusion protein comprises an antibody that binds IL-6 or IL-6R and VEGFR ECD. In some embodiments, this fusion protein is selected from the following: anti-IL6-VEGFR, anti-IL6R-VEGFR (e.g., SEQ ID NOs: 324, 79).

[0281] In some embodiments, the fusion protein comprises an antibody that binds IL-6 or IL-6R, VEGFR ECD, and an additional receptor ECD. In one embodiment, VEGFR ECD is fused to the heavy chain of the antibody and the additional receptor ECD is fused to the light chain of the antibody. Alternatively, VEGFR ECD is fused to light chain and additional receptor ECD is fused to heavy chain. In some embodiments, the additional receptor ECD is the ECD of a T cell co-inhibitory molecule. In one embodiment, the T cell co-inhibitory molecule is PD-1. In some embodiments, the fusion protein is selected from: anti-IL6R-VEGFR-PD1 (e.g., SEQ ID NOs: 324, 314). In another aspect, the additional receptor ECD is SIRPa ECD. In some embodiments, the fusion protein is selected from: anti-IL6R-VEGFR-SIRPa (e.g., SEQ ID NOs: 324, 316). In another aspect, the additional receptor ECD is SIGLEC10 ECD. In some embodiments, the fusion protein is selected from: anti-IL6R-VEGFR-SIGLEC10 (e.g., SEQ ID NOs: 324, 315).

[0282] In another embodiment, the ALT comprises an antibody that targets TGFb or TGFbR or GARP or LAP, wherein said antibody is fused to a ligand-binding sequence of an extracellular domain of VEGFR (VEGFR ECD). In another aspect an ALT comprises an antibody that targets TGFb or TGFbR, wherein said antibody is fused to a ligand-binding sequence of a VEGFR ECD, and additionally fused to a ligand-binding sequence of another different receptor ECD (receptor ECD-2). In various examples, receptor ECD-2 may be selected from a group comprising PD-1ECD, TIM-3ECD, BTLA ECD, or SIRPa. In one aspect, the VEGFR ECD sequence is fused to the C-terminus of the heavy chain of the targeting antibody, and another different receptor ECD-2 sequence is fused to the C-terminus of the light chain. In one aspect, the receptor ECD-2 fused to a TGFb or TGFbR targeting antibody binds to a cognate ligand expressed in the TME, thereby localizing the ALT and consequent VEGF/VEGFR and TGFb blockade to the TME. In one example, the receptor ECD-2 is a PD-1ECD sequence that binds PD-L1 or PD-L2 expressed on tumor cells or the TME. In another example, the receptor ECD-2 is a TIM-3ECD sequence that binds CEACAM-1 or CEACAM-5 or CEACAM-6 expressed on tumor cells or the TME. In another example, receptor ECD-2 is a BTLA ECD that binds HVEM expressed on tumor cells or the TME. In another example, the receptor ECD-2 is a SIRPa ECD sequence that binds CD47 expressed on tumor cells or the TME.

[0283] In some embodiments, the fusion protein comprises VEGFR ECD and a polypeptide that binds TGFb, TGFbR, or GARP. Exemplary embodiments of this fusion protein include anti-TGFb-VEGFR (e.g., SEQ ID NOs: 403, 133), anti-TGFbR-VEGFR, and anti-GARP-VEGFR (e.g., SEQ ID NOs: 415, 49).

[0284] In some embodiments, the fusion protein further comprises an additional receptor ECD. Exemplary embodiments of this fusion protein include anti-TGFb-VEGFR-SIRPa (e.g., SEQ ID NOs: 403, 396); anti-TGFb-VEGFR-SIGLEC10 (e.g., SEQ ID NOs: 403, 395); anti-TGFb-VEGFR-BTLA (e.g., SEQ ID NOs: 403, 399); anti-TGFb-VEGFR-TIM3 (e.g., SEQ ID NOs: 403, 397); anti-TGFb-VEGFR-PD1 (e.g., SEQ ID NOs: 403, 394).

[0285] In some embodiments, the fusion protein comprises VEGFR ECD and TGFbRII ECD. Exemplary embodiments of this fusion protein include VEGFR-Fc-TGFbRII (e.g., SEQ ID NO: 569) and TGFbRII-Fc-VEGFR (e.g., SEQ ID NO: 558).

[0286] In some embodiments, the fusion protein comprises VEGFR ECD and IL-15. In some embodiments, the fusion protein is IL15-Fc-VEGFR (e.g., SEQ ID NO: 598) or VEGFR-Fc-IL15 (e.g., SEQ ID NO: 597). In other embodiments, the fusion protein is IL12-Fc-VEGFR (e.g., SEQ ID NO: 596) or VEGFR-Fc-IL12 (e.g., SEQ ID NO: 595). In other embodiments, the fusion protein comprises an antibody with VEGFR ECD fused to heavy chain and IL-15 fused to light chain. In other embodiments, the fusion protein comprises an antibody with VEGFR ECD fused to heavy chain and IL-12 fused to light chain.

[0287] In various embodiments, the fusion proteins of the invention counteract TGFb in the tumor microenvironment. These fusion proteins are referred to as belonging to “Group 2”. In some embodiments, the fusion proteins comprise a ligand-binding sequence of an extracellular domain of TGFbR (e.g., TGFbRII ECD). In one embodiment, this ligand trap binds TGFb1, TGFb2, and/or TGFb3. In some embodiments, the TGFbR ECD may be a ligand-binding sequence of TGFbRII ECD. In some embodiments, the TGFbR ECD may be a fusion of domains from TGFbRII and TGFbRIII. In some embodiments, the TGFbR ECD may be selected from the following list: SEQ ID NOS: 177; 178; 179; 180.

[0288] In other embodiments, the fusion proteins of the invention comprise a targeting polypeptide that binds TGFb, TGFbR, LAP, or GARP fused to one or more receptor ECDs. These receptor ECDs are preferably selected from the following: PD1 ECD, TIM-3 ECD, VEGFR ECD, BTLA ECD, SIRPa ECD, SIGLEC 10 ECD. In some embodiments, the targeting polypeptide that binds TGFb, TGFbR, LAP, or GARP is an antibody.

[0289] In some embodiments, the ALT is a polypeptide comprising an antibody that targets TGFb or TGFbR, wherein said antibody is fused to a ligand-binding sequence of an extracellular domain of a Receptor. In one example, the ALT comprises an antibody that targets TGFb, wherein said antibody is fused to a ligand-binding sequence of an extracellular domain of Receptor (e.g. PD-1ECD, TIM-3ECD, VEGFR ECD, BTLA ECD, SIRPa ECD). In another aspect an ALT comprises an antibody that targets TGFb, wherein said antibody is fused to a ligand-binding sequence of a specific receptor ECD (receptor ECD-1), and additionally fused to a ligand-binding sequence of another different receptor ECD (receptor ECD-2). In various examples, receptor ECD-1 and receptor ECD-2 may be selected from a group comprising PD-1ECD, TIM-3ECD, VEGFR ECD, BTLA ECD, SIRPa ECD, SIGLEC10 ECD. In one aspect, the receptor ECD-1 sequence is fused to the C-terminus of the heavy chain of the targeting antibody, and another different receptor ECD-2 sequence is fused to the C-terminus of the light chain. In one aspect, the receptor ECD fused to a TGFb targeting antibody binds to a cognate ligand expressed in the TME, thereby localizing the ALT and consequent TGFb blockade to the TME. In one example, a PD-1ECD binds PD-L1 or PD-L2 expressed on tumor cells or the TME. In another example, a TIM-3ECD binds CEACAM-1 or CEACAM-5 or CEACAM-6 expressed on tumor cells or the TME. In another example, a BTLA ECD binds HVEM expressed on tumor cells or the TME. In another example, a SIRPa ECD binds CD47 expressed on tumor cells or the TME. Exemplary embodiments include anti-TGFb-PD1 (e.g., SEQ ID NOs: 398, 133); anti-TGFb-SIRPa (e.g., SEQ ID NOs: 401, 133); anti-TGFb-TIM3 (e.g., SEQ ID NOs: 402, 133); anti-TGFb-SIGLEC10 (e.g., SEQ ID NOs: 400, 133); anti-TGFb-BTLA (e.g., SEQ ID NOs: 393, 133); anti-TGFb-VEGFR (e.g., SEQ ID NOs: 403, 133)

[0290] Although CD47 targeted antibodies can promote antitumor immune responses by inhibiting the interaction of CD47 with SIRPa, its antitumor efficacy may be limited by TSP-1 dependent or TSP-1 independent activation of TGFb. In one embodiment, the ALT is a polypeptide comprising an antibody that targets CD47, wherein said antibody is fused to a TGFb-binding sequence from a extracellular domain of TGFbR (e.g. TGFbRII ECD). In this aspect, the ALT promotes antitumor immunity by disrupting the interaction of CD47 with SIRPa, while simultaneously counteracting TGFb-mediated immune dysfunction and angiogenesis. In another aspect, the ALT comprises a TGFb-binding sequence from one or more extracellular domains of TGFbR (e.g. TGFbRII ECD) and a CD47-binding sequence from one or more extracellular domains of SIRPa (SIRPa ECD).

[0291] Examples of fusion proteins of the invention that capture and disable TGFb in the TME include, but are not limited to the following: ALTs comprising an antibody fused to TGFbRECD (with or without another receptor ECD fused to the same antibody); ALTs where the antibody binds TGFb, TGFbR, LAP, or GARP, fused to one or more Receptor ECD(s).

[0292] In one aspect, the ALT is a polypeptide comprising an antibody fused to a TGFb-binding sequence from an extracellular domain of TGFbR (e.g. TGFbRII ECD). The TGFbRECD fused to the ALT localizes to the TME, where it serves as a decoy receptor to bind and disable TGFb (e.g TGFb1, TGFb2, TGFb3). In another aspect an ALT comprising a fused ligand-binding sequence of TGFbRECD is additionally fused to a different receptor ECD that captures and disables its cognate ligands (e.g. PD-1ECD, TIM-3ECD, VEGFR ECD, BTLA ECD, SIRPa ECD, SIGLEC10 ECD). In one aspect, the TGFbRECD is fused to the C-terminus of the heavy chain of the targeting antibody, and another different receptor ECD is fused to the C-terminus of the light chain. In one example, the TGFbRECD is fused to the C-terminus of the heavy chain of the targeting antibody, and a PD-1 ligand-binding sequence of PD-1ECD is fused to the C-terminus of the light chain. In another example, the TGFbRECD is fused to the C-terminus of the heavy chain of the targeting antibody, and a TIM-3 ligand-binding sequence of TIM-3ECD is fused to the C-terminus of the light chain. In another example, the TGFbRECD is fused to the C-terminus of the heavy chain of the targeting antibody, and a BTLA ligand-binding sequence of BTLA ECD is fused to the C-terminus of the light chain. In another example, the TGFbRECD is fused to the C-terminus of the heavy chain of the targeting antibody, and a CD47 ligand-binding sequence of SIRPa ECD is fused to the C-terminus of the light chain.

[0293] In some embodiments, the fusion protein comprises TGFbRII ECD and a polypeptide that inhibits the interaction between CD47 and SIRPa. In one embodiment, this fusion protein comprises TGFbRII ECD and a polypeptide that binds CD47. In one embodiment, this fusion protein is anti-CD47 mAb fused to TGFbRII ECD (anti-CD47-TGFbRII (e.g., SEQ ID NOs: 390, 22)). In another embodiment, this fusion protein comprises SIRPa ECD and TGFbRII ECD. In one embodiment, this fusion protein is SIRPa-Fc-TGFbRII (e.g., SEQ ID NO: 550) or TGFbRII-Fc-SIRPa (e.g., SEQ ID NO: 556).

[0294] In some embodiments, the fusion protein comprises TGFbRII ECD, a polypeptide that inhibits the interaction between CD47 and SIRPa, and another polypeptide. In a further embodiment, the fusion protein comprises TGFbRII ECD, a polypeptide that inhibits the interaction between CD47 and SIRPa, and another polypeptide that inhibits a T cell co-inhibitory molecule. In some embodiments, this fusion protein comprises anti-CD47 mAb with TGFbRII ECD fused to the heavy chain and a T cell co-inhibitory molecule ECD fused to the light chain. In a particular embodiment, this fusion protein is anti-CD47-TGFbRII-PD1 (e.g., SEQ ID NOs: 390, 384). In another embodiment, this fusion protein is anti-CD47-TGFbRII-BTLA (e.g., SEQ ID NOs: 390, 388). In another embodiment, this fusion protein is anti-CD47-TGFbRII-TIM3 (e.g., SEQ ID NOs: 390, 386).

[0295] In other embodiments, the fusion protein comprises TGFbRII ECD, SIRPa ECD, and an antibody with a heavy chain and light chain. In one embodiment, the TGFbRII ECD is fused to the heavy chain of the antibody and the SIRPa ECD is fused to the light chain of the antibody. In some embodiments, the antibody of said fusion protein binds a T cell co-inhibitory molecule as an antagonist. Exemplary embodiments of such fusion proteins include anti-CTLA4-TGFbRII-SIRPa (e.g., SEQ ID NOs: 444, 438), anti-PD1-TGFbRII-SIRPa (e.g., SEQ ID NOs: 456, 450), and anti-PDL1-TGFbRII-SIRPa (e.g., SEQ ID NOs: 466, 461). In other embodiments, the antibody of said fusion protein binds a T cell co-stimulatory molecule as an agonist. Exemplary embodiments of this fusion protein include anti-OX40-TGFbRII-SIRPa (e.g., SEQ ID NOs: 514, 508), anti-41BB-TGFbRII-SIRPa (e.g., SEQ ID NOs: 502, 496), and anti-CD40-TGFbRII-SIRPa. In other embodiments, the antibody of said fusion protein is a tumor-targeted antibody. In some embodiments, this tumor targeted-antibody binds a tumor growth factor or growth factor receptor. In other embodiments, this tumor targeted antibody binds a tumor cell surface molecule. Exemplary embodiments of this fusion protein include anti-EGFR-TGFbRII-SIRPa (e.g., SEQ ID NOs: 229, 223), anti-HER2-TGFbRII-SIRPa (e.g., SEQ ID NOs: 253, 247), anti-EGFRvIII-TGFbRII-SIRPa (e.g., SEQ ID NOs: 241, 235), anti-uPAR-TGFbRII-SIRPa, and anti-PSMA-TGFbRII-SIRPa.

[0296] In some embodiments, the fusion protein comprises TGFbRII ECD and a polypeptide that inhibits the interaction of BTLA and HVEM. In some embodiments, this fusion protein comprises an antibody that binds BTLA or HVEM fused to TGFbRII ECD. Exemplary embodiments of this fusion protein include anti-BTLA-TGFbRII and anti-HVEM-TGFbRII, BTLA-Fc-TGFbRII (e.g., SEQ ID NO: 532), and TGFbRII-Fc-BTLA (e.g., SEQ ID NO: 553).

[0297] In some embodiments, the fusion protein comprises TGFbRII ECD and a polypeptide that inhibits the interaction of TIGIT or PVRIG with PVRL2 or PVR. In some embodiments, this fusion protein comprises an antibody that binds TIGIT or PVRIG fused to TGFbRII ECD. Exemplary embodiments of this fusion protein include anti-TIGIT-TGFbRII (e.g., SEQ ID NOs: 478, 139) and anti-PVRIG-TGFbRII.

[0298] In some embodiments, the fusion protein comprises TGFbRII ECD and a polypeptide that inhibits the interaction of VISTA and VSIG8. In some embodiments, this fusion protein comprises an antibody that binds VISTA or VSIG8 fused to TGFbRII ECD. Exemplary embodiments of this fusion protein include anti-VISTA-TGFbRII and anti-VSIG8-TGFbRII.

[0299] In some embodiments, the fusion protein comprises TGFbRII ECD, an antibody that binds and disables a T cell co-inhibitory molecule, and an additional receptor ECD. In one aspect, the TGFbRII ECD is fused to the heavy chain of the antibody and the additional receptor ECD is fused to the light chain of the antibody.

[0300] In some embodiments, the fusion protein comprises TGFbRII ECD, an antibody that binds and disables a T cell co-inhibitory molecule, and PD1 ECD. Exemplary embodiments of this fusion protein include anti-TIGIT-TGFbRII-PD1 (e.g., SEQ ID NOs: 478, 470); anti-TIM3-TGFbRII-PD1 (e.g., SEQ ID NOs: 490, 482); anti-PD1-TGFbRII-PD1 (e.g., SEQ ID NOs: 456, 448); anti-CTLA4-TGFbRII-PD1 (e.g., SEQ ID NOs: 444, 436).

[0301] In other embodiments, the fusion protein comprises TGFbRII ECD, an antibody that binds and disables a T cell co-inhibitory molecule, and BTLA ECD. Exemplary embodiments of this fusion protein include anti-TIGIT-TGFbRII-BTLA (e.g., SEQ ID NOs: 478, 475); anti-PDL1-TGFbRII-BTLA (e.g., SEQ ID NOs: 466, 464); anti-CTLA4-TGFbRII-BTLA (e.g., SEQ ID NOs: 444, 441); anti-PD1-TGFbRII-BTLA (e.g., SEQ ID NOs: 456, 453); anti-TIM3-TGFbRII-BTLA (e.g., SEQ ID NOs: 490, 487).

[0302] In other embodiments, the fusion protein comprises TGFbRII ECD, an antibody that binds and disables a T cell co-inhibitory molecule, and TIM3 ECD. Exemplary embodiments of this fusion protein include anti-TIGIT-TGFbRII-TIM3 (e.g., SEQ ID NOs: 478, 473); anti-TIM3-TGFbRII-TIM3 (e.g., SEQ ID NOs: 490, 485); anti-CTLA4-TGFbRII-TIM3 (e.g., SEQ ID NOs: 444, 439); anti-PD1-TGFbRII-TIM3 (e.g., SEQ ID NOs: 456, 451); anti-PDL1-TGFbRII-TIM3 (e.g., SEQ ID NOs: 466, 462).

[0303] In other embodiments, the fusion protein comprises TGFbRII ECD, an antibody that binds and disables a T cell co-inhibitory molecule, and SIRPa ECD. Exemplary embodiments of this fusion protein include anti-PDL1-TGFbRII-SIRPa (e.g., SEQ ID NOs: 466, 461); anti-CTLA4-TGFbRII-SIRPa (e.g., SEQ ID NOs: 444, 438); anti-TIM3-TGFbRII-SIRPa (e.g., SEQ ID NOs: 490, 484); anti-PD1-TGFbRII-SIRPa (e.g., SEQ ID NOs: 456, 450); anti-TIGIT-TGFbRII-SIRPa (e.g., SEQ ID NOs: 478, 472).

[0304] In other embodiments, the fusion protein comprises TGFbRII ECD, an antibody that binds and disables a T cell co-inhibitory molecule, and SIGLEC10 ECD. Exemplary embodiments of this fusion protein include anti-CTLA4-TGFbRII-SIGLEC10 (e.g., SEQ ID NOs: 444, 437); anti-PDL1-TGFbRII-SIGLEC10 (e.g., SEQ ID NOs: 466, 460); anti-TIM3-TGFbRII-SIGLEC10 (e.g., SEQ ID NOs: 490, 483); anti-PD1-TGFbRII-SIGLEC10 (e.g., SEQ ID NOs: 456, 449); anti-TIGIT-TGFbRII-SIGLEC10 (e.g., SEQ ID NOs: 478, 471).

[0305] In one embodiment, the fusion protein comprises a polypeptide that binds a T cell co-stimulatory molecule and TGFbRII ECD.

[0306] In some embodiments, the fusion protein is a native T cell co-stimulatory molecule ECD fused to TGFbRII (either N-costimulatory ECD-Fc-TGFbRII ECD-C, or N-TGFbRII ECD-Fc-costimulatory ECD-C). In some embodiments, this fusion protein is selected from: 41BBL-Fc-TGFbRII (e.g., SEQ ID NO: 616); ICOSL-Fc-TGFbRII (e.g., SEQ ID NO: 626); OX40L-Fc-TGFbRII (e.g., SEQ ID NO: 630), TGFbRII-Fc-ICOSL (e.g., SEQ ID NO: 625); TGFbRII-Fc-OX40L (e.g., SEQ ID NO: 629); TGFbRII-Fc-41BBL (e.g., SEQ ID NO: 615).

[0307] In other embodiments, the fusion protein comprises an antibody or other polypeptide that binds a T cell co-stimulatory molecule fused to TGFbRII. This antibody or polypeptide is preferably an agonist of the T cell co-stimulatory molecule. In some embodiments, this fusion protein is selected from: anti-ICOS-TGFbRII (e.g., SEQ ID NOs: 526, 59); anti-OX40-TGFbRII (e.g., SEQ ID NOs: 514, 97); anti-41BB-TGFbRII (e.g., SEQ ID NOs: 502, 2).

[0308] In a further aspect, the fusion protein comprises an antibody that binds a T cell-costimulatory molecule, TGFbRII ECD, and an additional receptor ECD. In one aspect, the TGFbRII ECD is fused to the heavy chain of the antibody and the additional receptor ECD is fused to the light chain of the antibody. In some embodiments, the additional receptor ECD is the ECD of a T cell co-inhibitory molecule. In one embodiment, the T cell co-inhibitory molecule is PD-1. In some embodiments, the fusion protein is selected from: anti-41BB-TGFbRII-PD1 (e.g., SEQ ID NOs: 502, 494); anti-OX40-TGFbRII-PD1 (e.g., SEQ ID NOs: 514, 506); anti-ICOS-TGFbRII-PD1 (e.g., SEQ ID NOs: 526, 518). In another embodiment, the T cell co-inhibitory molecule is BTLA. In some embodiments, the fusion protein is selected from: anti-OX40-TGFbRII-BTLA (e.g., SEQ ID NOs: 514, 511); anti-41BB-TGFbRII-BTLA (e.g., SEQ ID NOs: 502, 499); anti-ICOS-TGFbRII-BTLA (e.g., SEQ ID NOs: 526, 523). In another embodiment, the T cell co-inhibitory molecule is TIM3. In some embodiments, the fusion protein is selected from: anti-41BB-TGFbRII-TIM3 (e.g., SEQ ID NOs: 502, 497); anti-OX40-TGFbRII-TIM3 (e.g., SEQ ID NOs: 514, 509); anti-ICOS-TGFbRII-TIM3 (e.g., SEQ ID NOs: 526, 521). In another aspect, the additional receptor ECD is SIRPa ECD. In some embodiments, the fusion protein is selected from: anti-ICOS-TGFbRII-SIRPa (e.g., SEQ ID NOs: 526, 520); anti-41BB-TGFbRII-SIRPa (e.g., SEQ ID NOs: 502, 496); anti-OX40-TGFbRII-SIRPa (e.g., SEQ ID NOs: 514, 508). In another aspect, the additional receptor ECD is SIGLEC10 ECD. In some embodiments, the fusion protein is selected from: anti-41BB-TGFbRII-SIGLEC10 (e.g., SEQ ID NOs: 502, 495); anti-ICOS-TGFbRII-SIGLEC10 (e.g., SEQ ID NOs: 526, 519); anti-OX40-TGFbRII-SIGLEC10 (e.g., SEQ ID NOs: 514, 507).

[0309] In one embodiment, the fusion protein comprises TGFbRII ECD and a polypeptide that binds an ectonucleotidase. In a preferred embodiment, the ectonucleotidase is either CD39 or CD73. In some embodiments, the fusion protein comprises TGFbRII ECD, an antibody that binds CD39 or CD73, and an additional receptor ECD. In a preferred embodiment, the TGFbRII ECD is fused to the heavy chain of the antibody and the additional receptor ECD is fused to the light chain of the antibody. In some embodiments, the fusion protein is selected from the following: anti-CD73-TGFbRII-SIRPa (e.g., SEQ ID NOs: 425, 419); anti-CD73-TGFbRII-SIGLEC10 (e.g., SEQ ID NOs: 425, 418); anti-CD73-TGFbRII-BTLA (e.g., SEQ ID NOs: 425, 422); anti-CD73-TGFbRII-PD1 (e.g., SEQ ID NOs: 425, 417); anti-CD73-TGFbRII-TIM3 (e.g., SEQ ID NOs: 425, 420).

[0310] In some embodiments, the fusion protein comprises a tumor-targeted antibody and TGFbRII ECD. In some embodiments, this tumor targeted-antibody binds a tumor growth factor or growth factor receptor. In other embodiments, this tumor targeted antibody binds a tumor cell surface molecule. In some embodiments, this fusion protein is selected from the following: anti-EGFRvIII-TGFbRII (e.g., SEQ ID NOs: 241, 47), anti-uPAR-TGFbRII (e.g., SEQ ID NOs: 272, 162), anti-PSMA-TGFbRII (e.g., SEQ ID NOs: 279, 121), anti-nectin-4-TGFbRII.

[0311] In a further embodiment, the fusion protein comprises a tumor-targeted antibody, TGFbRII ECD, and an additional receptor ECD. In a preferred embodiment, the TGFbRII is fused to the heavy chain of the antibody and the additional receptor ECD is fused to the light chain of the antibody. In some embodiments, the additional receptor ECD is the ECD of a T cell co-inhibitory molecule. In one embodiment, the T cell co-inhibitory molecule is PD-1. In some embodiments, the fusion protein is selected from: anti-HER2-TGFbRII-PD1 (e.g., SEQ ID NOs: 253, 245); anti-EGFR-TGFbRII-PD1 (e.g., SEQ ID NOs: 229, 221); anti-nectin4-TGFbRII-PD1 (e.g., SEQ ID NOs: 265, 257); anti-EGFRvIII-TGFbRII-PD1 (e.g., SEQ ID NOs: 241, 233). In another embodiment, the T cell co-inhibitory molecule is BTLA. In some embodiments, the fusion protein is selected from: anti-HER2-TGFbRII-BTLA (e.g., SEQ ID NOs: 253, 250); anti-EGFR-TGFbRII-BTLA (e.g., SEQ ID NOs: 229, 226); anti-EGFRvIII-TGFbRII-BTLA (e.g., SEQ ID NOs: 241, 238); anti-nectin4-TGFbRII-BTLA (e.g., SEQ ID NOs: 265, 262). In another embodiment, the T cell co-inhibitory molecule is TIM3. In some embodiments, the fusion protein is selected from: anti-EGFR-TGFbRII-TIM3 (e.g., SEQ ID NOs: 229, 224); anti-EGFRvIII-TGFbRII-TIM3 (e.g., SEQ ID NOs: 241, 236); anti-HER2-TGFbRII-TIM3 (e.g., SEQ ID NOs: 253, 248); anti-nectin4-TGFbRII-TIM3 (e.g., SEQ ID NOs: 265, 260). In another aspect, the additional receptor ECD is SIRPa ECD. In some embodiments, the fusion protein is selected from: anti-EGFR-TGFbRII-SIRPa (e.g., SEQ ID NOs: 229, 223); anti-nectin4-TGFbRII-SIRPa (e.g., SEQ ID NOs: 265, 259); anti-HER2-TGFbRII-SIRPa (e.g., SEQ ID NOs: 253, 247); anti-EGFRvIII-TGFbRII-SIRPa (e.g., SEQ ID NOs: 241, 235). In another aspect, the additional receptor ECD is SIGLEC10 ECD. In some embodiments, the fusion protein is selected from: anti-nectin4-TGFbRII-SIGLEC10 (e.g., SEQ ID NOs: 265, 258); anti-HER2-TGFbRII-SIGLEC10 (e.g., SEQ ID NOs: 253, 246); anti-EGFRvIII-TGFbRII-SIGLEC10 (e.g., SEQ ID NOs: 241, 234); anti-EGFR-TGFbRII-SIGLEC10 (e.g., SEQ ID NOs: 229, 222).

[0312] In one aspect an ALT of the invention simultaneously counteracts VEGF and TGFb in the tumor microenvironment. In one example, the ALT comprises an antibody that targets either VEGF or VEGFR, wherein said antibody is fused to a TGFb-binding sequence of an extracellular domain of the TGFbR (e.g. TGFbRII ECD). In another aspect an ALT comprises an antibody that targets either VEGF or VEGFR, wherein said antibody is fused to a ligand-binding sequence of TGFbRECD, and additionally fused to a ligand-binding sequence of another different receptor ECD (receptor ECD-2). In various examples, receptor ECD-2 may be selected from a group comprising PD-1ECD, TIM-3ECD, BTLA ECD, or SIRPa ECD. In one aspect, the TGFb-binding TGFbRII ECD sequence is fused to the C-terminus of the heavy chain of the targeting antibody, and the receptor ECD-2 sequence is fused to the C-terminus of the light chain. In one aspect, the receptor ECD-2 sequence is fused to a VEGF or VEGFR targeting antibody; and binds to a cognate ligand expressed in the TME, thereby localizing the ALT and consequent VEGF/VEGFR and TGFb blockade to the TME. In one example, the receptor ECD-2 is a PD-1ECD sequence that binds PD-L1 or PD-L2 expressed on tumor cells or the TME. In another example, the receptor ECD-2 is a TIM-3ECD sequence that binds CEACAM-1 or CEACAM-5 or CEACAM-6 expressed on tumor cells or the TME. In another example, receptor ECD-2 is a BTLA ECD that binds HVEM expressed on tumor cells or the TME. In another example, the receptor ECD-2 is a SIRPa ECD sequence that binds CD47 expressed on tumor cells or the TME.

[0313] In some embodiments, the fusion protein comprises TGFbRII ECD and a polypeptide that inhibits VEGF/VEGFR signaling.

[0314] In some embodiments, the fusion protein comprises TGFbRII ECD and anti-VEGFR mAb. In some embodiments, this fusion protein is anti-VEGFR-TGFbRII (e.g., SEQ ID NOs: 381, 148). In a further embodiment, the fusion protein may additionally comprise a receptor ECD fused to the light chain of the antibody. In some embodiments, the fusion protein is selected from anti-VEGFR-TGFbRII-TIM3 (e.g., SEQ ID NOs: 381, 376); anti-VEGFR-TGFbRII-BTLA (e.g., SEQ ID NOs: 381, 378); anti-VEGFR-TGFbRII-SIGLEC10 (e.g., SEQ ID NOs: 381, 374); anti-VEGFR-TGFbRII-PD1 (e.g., SEQ ID NOs: 381, 373); anti-VEGFR-TGFbRII-SIRPa (e.g., SEQ ID NOs: 381, 375).

[0315] In some embodiments, the fusion protein comprises TGFbRII ECD and anti-VEGF mAb. In some embodiments, this fusion protein is anti-VEGF-TGFbRII (e.g., SEQ ID NOs: 370, 32). In a further embodiment, the fusion protein may additionally comprise a receptor ECD fused to the light chain of the antibody. In some embodiments, the fusion protein is selected from anti-VEGF-TGFbRII-TIM3 (e.g., SEQ ID NOs: 370, 365); anti-VEGF-TGFbRII-SIRPa (e.g., SEQ ID NOs: 370, 364); anti-VEGF-TGFbRII-PD1 (e.g., SEQ ID NOs: 370, 362); anti-VEGF-TGFbRII-BTLA (e.g., SEQ ID NOs: 370, 367); anti-VEGF-TGFbRII-SIGLEC10 (e.g., SEQ ID NOs: 370, 363).

[0316] In other embodiments, the fusion protein comprises TGFbRII ECD and VEGFR ECD. In one embodiment, this fusion protein is TGFbRII-Fc-VEGFR (e.g., SEQ ID NO: 558). In another embodiment, this fusion protein is VEGFR-Fc-TGFbRII (e.g., SEQ ID NO: 569).

[0317] In some embodiments, the fusion protein comprises an antibody that binds IL-17 or IL-17R and TGFbRII ECD. In some embodiments, this fusion protein is selected from the following: anti-IL17-TGFbRII, anti-IL17R-TGFbRII (e.g., SEQ ID NOs: 334, 63).

[0318] In a further embodiment, the fusion protein comprises an antibody that binds IL-17 or IL-17R, TGFbRII ECD, and an additional receptor ECD. In a preferred embodiment, the TGFbRII is fused to the heavy chain of the antibody and the additional receptor ECD is fused to the light chain of the antibody. In some embodiments, the additional receptor ECD is the ECD of a T cell co-inhibitory molecule. In one embodiment, the T cell co-inhibitory molecule is PD-1. In some embodiments, the fusion protein is selected from: anti-IL17R-TGFbRII-PD1 (e.g., SEQ ID NOs: 334, 326). In another embodiment, the T cell co-inhibitory molecule is BTLA. In some embodiments, the fusion protein is selected from: anti-IL17R-TGFbRII-BTLA (e.g., SEQ ID NOs: 334, 331). In another embodiment, the T cell co-inhibitory molecule is TIM3. In some embodiments, the fusion protein is selected from: anti-IL17R-TGFbRII-TIM3 (e.g., SEQ ID NOs: 334, 329). In another aspect, the additional receptor ECD is SIRPa ECD. In some embodiments, the fusion protein is selected from: anti-IL17R-TGFbRII-SIRPa (e.g., SEQ ID NOs: 334, 328). In another aspect, the additional receptor ECD is SIGLEC10 ECD. In some embodiments, the fusion protein is selected from: anti-IL17R-TGFbRII-SIGLEC10 (e.g., SEQ ID NOs: 334, 327).

[0319] In some embodiments, the fusion protein comprises an antibody that binds IL-23 or IL-23R and TGFbRII ECD. If the antibody binds IL-23, it is preferred that the antibody bind the p19 subunit of IL-23 that is not shared with IL-12. In some embodiments, this fusion protein is selected from the following: anti-IL23-TGFbRII (e.g., SEQ ID NOs: 346, 75), anti-IL23R-TGFbRII.

[0320] In a further embodiment, the fusion protein comprises an antibody that binds IL-23 or IL-23R, TGFbRII ECD, and an additional receptor ECD. In a preferred embodiment, the TGFbRII is fused to the heavy chain of the antibody and the additional receptor ECD is fused to the light chain of the antibody. In some embodiments, the additional receptor ECD is the ECD of a T cell co-inhibitory molecule. In one embodiment, the T cell co-inhibitory molecule is PD-1. In some embodiments, the fusion protein is selected from: anti-IL23-TGFbRII-PD1 (e.g., SEQ ID NOs: 346, 338). In another embodiment, the T cell co-inhibitory molecule is BTLA. In some embodiments, the fusion protein is selected from: anti-IL23-TGFbRII-BTLA (e.g., SEQ ID NOs: 346, 343). In another embodiment, the T cell co-inhibitory molecule is TIM3. In some embodiments, the fusion protein is selected from: anti-IL23-TGFbRII-TIM3 (e.g., SEQ ID NOs: 346, 341). In another aspect, the additional receptor ECD is SIRPa ECD. In some embodiments, the fusion protein is selected from: anti-IL23-TGFbRII-SIRPa (e.g., SEQ ID NOs: 346, 340). In another aspect, the additional receptor ECD is SIGLEC10 ECD. In some embodiments, the fusion protein is selected from: anti-IL23-TGFbRII-SIGLEC10 (e.g., SEQ ID NOs: 346, 339).

[0321] In some embodiments, the fusion protein comprises an antibody that binds IL-6 or IL-6R, TGFbRII ECD, and an additional receptor ECD. In a preferred embodiment, the TGFbRII is fused to the heavy chain of the antibody and the additional receptor ECD is fused to the light chain of the antibody. In some embodiments, the additional receptor ECD is the ECD of a T cell co-inhibitory molecule. In one embodiment, the T cell co-inhibitory molecule is PD-1. In some embodiments, the fusion protein is selected from: anti-IL6R-TGFbRII-PD1 (e.g., SEQ ID NOs: 322, 314). In another embodiment, the T cell co-inhibitory molecule is BTLA. In some embodiments, the fusion protein is selected from: anti-IL6R-TGFbRII-BTLA (e.g., SEQ ID NOs: 322, 319). In another embodiment, the T cell co-inhibitory molecule is TIM3. In some embodiments, the fusion protein is selected from: anti-IL6R-TGFbRII-TIM3 (e.g., SEQ ID NOs: 322, 317). In another aspect, the additional receptor ECD is SIRPa ECD. In some embodiments, the fusion protein is selected from: anti-IL6R-TGFbRII-SIRPa (e.g., SEQ ID NOs: 322, 316). In another aspect, the additional receptor ECD is SIGLEC10 ECD. In some embodiments, the fusion protein is selected from: anti-IL6R-TGFbRII-SIGLEC10 (e.g., SEQ ID NOs: 322, 315).

[0322] In some embodiments, the fusion protein comprises TGFbRII ECD and IL-15. In some embodiments, the fusion protein is IL15-Fc-TGFbRII (e.g., SEQ ID NO: 590) or TGFbRII-Fc-IL15 (e.g., SEQ ID NO: 589). In other embodiments, the fusion protein is IL12-Fc-TGFbRII (e.g., SEQ ID NO: 588) or TGFbRII-Fc-IL12 (e.g., SEQ ID NO: 587). In other embodiments, the fusion protein comprises an antibody with TGFbRII ECD fused to heavy chain and IL-15 fused to light chain. In other embodiments, the fusion protein comprises an antibody with TGFbRII ECD fused to heavy chain and IL-12 fused to light chain.

[0323] The data in Example 3 demonstrates that a fusion protein that blocks VEGF and also comprises the ECD of a molecule that inhibits immune cells (e.g., T cells, dendritic cells, macrophages) is effective in treating cancer. As such, in some embodiments of the invention, the fusion protein comprises a VEGF/VEGFR-blocking polypeptide and the ECD of an immuno-inhibitory receptor (e.g., SIRPa, SIGLEC10, PD1, BTLA, TIM-3). In other embodiments, the fusion protein comprises VEGFR ECD and an antibody that binds and disables the interaction of an immuno-inhibitory receptor and its ligand (e.g., anti-BTLA-VEGFR, anti-CD47-VEGFR, anti-PD1-VEGFR, anti-PDL1-VEGFR). In other embodiments, the fusion protein comprises VEGFR and the ECD of an immuno-inhibitory receptor (e.g., VEGFR-Fc-SIRPa, VEGFR-Fc-BTLA, VEGFR-Fc-SIGLEC10). In other embodiments, the fusion protein comprises anti-VEGF/VEGFR mAb and the ECD of an immuno-inhibitory receptor (e.g., anti-VEGF-SIRPa, anti-VEGF-BTLA, anti-VEGF-TIM3).

[0324] Furthermore, Example 3 demonstrates that a fusion protein that blocks VEGF and also comprises the ECD of a T cell co-inhibitory molecule is effective in treating cancer. As such, in some embodiments of the invention, the fusion protein comprises a VEGF/VEGFR-blocking polypeptide and the ECD of a T cell co-inhibitory molecule (e.g., PD1, BTLA, TIM-3).

[0325] Furthermore, Example 3 demonstrates that a fusion protein that blocks VEGF and also comprises a polypeptide that binds a tumor cell surface molecule or molecule enriched in the tumor microenvironment is effective in localizing VEGF to the tumor microenvironment. As such, in some embodiments of the invention, the fusion protein comprises a VEGF/VEGFR-blocking polypeptide and a polypeptide that binds a tumor cell surface molecule or molecule enriched in the tumor microenvironment. In some embodiments, this fusion protein comprises VEGFR ECD fused to an antibody that localizes to the TME (anti-nectin-4-VEGFR, anti-PSMA-VEGFR, anti-IL17R-VEGFR, anti-CD47-VEGFR). In other embodiments, this fusion protein comprises anti-VEGF/VEGFR antibody fused to a receptor ECD that localizes to the TME (e.g., anti-VEGF-BTLA, anti-VEGF-TIM3).

[0326] The data in Example 4 demonstrates that blockade of TGFb and VEGF is more effective in treatment of cancer than blockade of VEGF alone. As such, in some embodiments of the invention, the fusion protein comprises a polypeptide that inhibits TGFb and a polypeptide that inhibits VEGF. In some embodiments, this fusion protein comprises TGFbRII and VEGFR (e.g., TGFbRII-Fc-VEGFR). In other embodiments, the fusion protein comprises antibody that binds TGFb, TGFbR, LAP, or GARP and VEGFR (e.g., anti-TGFb-VEGFR). In other embodiments, the fusion protein comprises antibody that binds VEGF or VEGFR and TGFbRII ECD (e.g., anti-VEGF-TGFbRII, anti-VEGFR-TGFbRII).

[0327] Furthermore, Example 4 demonstrates that a fusion protein comprising an anti-VEGF/VEGFR polypeptide and another polypeptide that inhibits angiogenesis (e.g., TGFb) is effective in the treatment of cancer. As such, in some embodiments of the invention, the fusion protein comprises VEGFR ECD and a polypeptide that inhibits another determinant of angiogenesis. This additional determinant of angiogenesis may be TGFb, IL-17, or IL-17R. In some embodiments, this fusion protein is anti-TGFb-VEGFR, anti-IL17-VEGFR, anti-IL17R-VEGFR, or TGFbRII-Fc-VEGFR.

[0328] Furthermore, Example 4 demonstrates that a fusion protein comprising an antibody that inhibits angiogenesis fused to a receptor ECD that inhibits angiogenesis is effective in the treatment of cancer. As such, in some embodiments of the invention, the fusion protein comprises an antibody that inhibits angiogenesis (e.g., anti-VEGF, anti-VEGFR, anti-TGFb, anti-TGFbR, anti-IL-17, anti-IL17R) fused to a receptor ECD that inhibits angiogenesis (VEGFR ECD, TGFbRII ECD). Exemplary embodiments of these fusion proteins include anti-VEGF-TGFbRII, anti-IL17-TGFbRII, anti-IL17R-TGFbRII, anti-IL17-VEGFR, anti-IL17R-VEGFR, anti-TGFb-VEGFR.

[0329] Furthermore, Example 4 demonstrates that a fusion protein comprising anti-VEGF/VEGFR antibody and a receptor ECD that inhibits angiogenesis is effective in the treatment of cancer. As such, in some embodiments of the invention, the fusion protein comprises anti-VEGF/VEGFR mAb and a receptor ECD that inhibits angiogenesis. In some embodiments, this receptor ECD that inhibits angiogenesis is TGFbRII.

[0330] Furthermore, Example 4 demonstrates that a fusion protein comprising an anti-angiogenic polypeptide and a polypeptide that inhibits a key determinant of TH17 differentiation is effective in the treatment of cancer. As such, in some embodiments of the invention, the fusion protein comprises VEGFR and polypeptide that binds a key determinant of TH17 differentiation. In some embodiments, this key determinant of TH17 differentiation is TGFb/TGFbR, IL-6/IL-6R, IL-1/IL-1R, or IL-23/IL-23R. Exemplary embodiments of these fusion proteins include anti-IL23-TGFbRII, anti-IL23R-TGFbRII, anti-IL23-VEGFR, and anti-IL23R-VEGFR.

[0331] Furthermore, Example 4 demonstrates that localized blockade of VEGF and/or TGFb in the tumor microenvironment is effective in the treatment of cancer. As such, in some embodiments of the invention, a combination therapy of a tumor-localized inhibitor of VEGF is combined with an inhibitor of TGFb. In other embodiments, a combination therapy of a tumor-localized inhibitor of VEGF is combined with a tumor-localized inhibitor of TGFb. In other embodiments, a combination therapy of an inhibitor of VEGF is combined with a tumor-localized inhibitor of TGFb.

[0332] In some embodiments, tumor localization of VEGF inhibition is achieved via an ALT or ECD-ECD of the invention comprising VEGFR ECD and a polypeptide that binds a tumor cell surface molecule, cell surface molecule of a tumor-infiltrating immune cell, or other factor enriched in the tumor microenvironment. Exemplary embodiments of this agent include anti-CD47-VEGFR, anti-PDL1-VEGFR, anti-HER2-VEGFR, anti-EGFRvIII-VEGFR, anti-PSMA-VEGFR, anti-nectin-4-VEGFR. Further exemplary embodiments of this agent that localize to tumor-infiltrating T cells (e.g., tumor-infiltrating Tregs) include anti-CD39-VEGFR, anti-CD73-VEGFR, anti-CTLA4-VEGFR. In a further embodiment, the localizing polypeptide of the VEGFR-containing fusion protein is a receptor ECD. Exemplary embodiments of this fusion protein include VEGFR-Fc-SIRPa, VEGFR-Fc-BTLA, VEGFR-Fc-PD1, VEGFR-Fc-TIM3. In other embodiments, tumor localization of VEGF inhibition is achieved by an ALT of the invention comprising anti-VEGF/VEGFR mAb fused to a receptor ECD that binds a tumor cell or tumor-infiltrating immune cell. Exemplary embodiments of this agent include anti-VEGF-SIRPa, anti-VEGF-SIGLEC10, anti-VEGF-BTLA, anti-VEGF-TIM3, anti-VEGF-PD1.

[0333] In some embodiments, tumor localization of TGFb inhibition is achieved via an ALT or ECD-ECD of the invention comprising TGFbRII ECD and a polypeptide that binds a tumor cell surface molecule, cell surface molecule of a tumor-infiltrating immune cell, or other factor enriched in the tumor microenvironment. Exemplary embodiments of this agent include anti-CD47-TGFbRII, anti-PDL1-TGFbRII, anti-HER2-TGFbRII, and anti-nectin-4-TGFbRII. Further exemplary embodiments of this agent that localize to tumor-infiltrating T cells (e.g., tumor-infiltrating Tregs) include anti-CD39-TGFbRII, anti-CD73-TGFbRII, anti-CTLA4-TGFbRII. In a further embodiment, the localizing polypeptide of the TGFbRII-containing fusion protein is a receptor ECD. Exempary embodiments of this fusion protein include TGFbRII-Fc-SIRPa, TGFbRII-Fc-BTLA, TGFbRII-Fc-PD1, TGFbRII-Fc-TIM3. In other embodiments, tumor localization of TGFb inhibition is achieved by an ALT of the invention comprising anti-TGFb/TGFbR/GARP/LAP mAb fused to a receptor ECD that binds a tumor cell or tumor-infiltrating immune cell. Exemplary embodiments of this agent include anti-TGFb-SIRPa, anti-TGFb-SIGLEC10, anti-TGFb-BTLA, anti-TGFb-TIM3, anti-TGFb-PD1.

[0334] In some embodiments, the VEGF inhibitor is selected from the following: anti-VEGF antibody (e.g., bevacizumab), VEGFR antibody (e.g. ramucirumab), VEGFR kinase inhibitor (e.g., sunitinib, sorafenib, axitinib, cabozantinib, regorafenib, pazopanib, vandetanib, lenvatenib), or VEGFRecd-Fc fusion protein (e.g., aflibercept), or ALT comprising a ligand-binding sequence of VEGFRecd.

[0335] In some embodiments, the TGFb inhibitor is selected from the following: TGFbRI kinase inhibitor (e.g., galunisertib), anti-TGFb antibody (e.g., fresolimumab), anti-GARP antibody, anti-LAP antibody, anti-TGFbR antibody, fusion protein comprising TGFbRecd (e.g., TGFbRII-Fc), ALT comprising TGFbRecd (e.g., anti-PDL1-TGFbRIIecd, M7824, bintrafusp alfa, anti-CD73-TGFbRII, anti-CD39-TGFbRII).

[0336] The data in Example 5 demonstrate that tumor-targeted TGFbRII is effective in treating cancer. As such, in some embodiments of the invention, the fusion protein comprises TGFbRII ECD and a polypeptide that localizes the fusion protein to the tumor microenvironment. Exemplary embodiments of this fusion protein include anti-EGFRvIII-TGFbRII, anti-PSMA-TGFbRII, anti-nectin-4-TGFbRII, anti-CD47-TGFbRII.

[0337] Furthermore, Example 5 demonstrates that fusion proteins comprising TGFbRII and a polypeptide that induces or promotes ADCC/FcR-mediated cross-presentation is effective in treating cancer. As such, in some embodiments of the invention, the fusion protein comprises TGFbRII and an antibody that induces or promotes ADCC/FcR-mediated cross-presentation. In some embodiments, this fusion protein promotes ADCC/FcR-mediated cross-presentation by disabling a “don't eat me” signal on the tumor cell. In some embodiments, this “don't eat me” signal is CD47/SIRPa, SIGLEC10/CD24, CD31/CD31, or LILRB1/MHC. Exemplary embodiments of this fusion protein include anti-CD47-TGFbRII and SIRPa-Fc-TGFbRII and SIGLEC10-Fc-TGFbRII.

[0338] Furthermore, the invention comprises methods of treatment of cancer comprising one agent that is a TGFbRII-comprising fusion protein and another agent that promotes ADCC/FcR-mediated cross-presentation. In some embodiments, the TGFbRII-comprising fusion protein is an ALT or ECD-ECD comprising TGFbRII. In a particular aspect, the TGFbRII-comprising fusion protein comprises an antibody that binds a tumor cell surface molecule or tumor-infiltrating T cell cell surface molecule. Exemplary TGFbRII-comprising fusion proteins that bind tumor cell surface molecules include anti-EGFR-TGFbRII, anti-HER2-TGFbRII, anti-PSMA-TGFbRII, anti-nectin-4-TGFbRII, anti-IL17R-TGFbRII, and anti-PDL1-TGFbRII. Exemplary TGFbRII-comprising fusion proteins that bind tumor-infiltrating T cell cell surface molecules include anti-CD73-TGFbRII, anti-CD39-TGFbRII, anti-CTLA4-TGFbRII. Exemplary agents that promote ADCC/FcR-mediated cross presentation include anti-CD47, SIRPa-Fc, ALTs comprising anti-CD47, and ALTs comprising SIRPa ECD. Exemplary embodiments of this method of treatment include combination of anti-CD47 mAb with anti-CD73-TGFbRII, anti-CD47 mAb with anti-CD39-TGFbRII, anti-CD47 with anti-PDL1-TGFbRII, or anti-CD47 with anti-CTLA4-TGFbRII.

[0339] Furthermore, the invention comprises methods of treatment of cancer comprising one agent that blocks TGFb in the tumor microenvironment, and another agent that promotes ADCC/FcR-mediated cross-presentation. In some embodiments, the agent that blocks TGFb in the tumor microenvironment comprises an antibody to TGFb, TGFbR, LAP, or GARP fused to a receptor ECD that binds a tumor cell surface molecule or tumor-infiltrating T cell cell surface molecule (e.g., SIRPa ECD, BTLA ECD, TIM-3 ECD, PD-1 ECD, SIGLEC10 ECD).

[0340] In another aspect, fusion proteins of the invention counteract ITIM/ITSM signaling in the TME. In one embodiment, the fusion protein of the invention counteracts an immune cell inhibitory molecule that inhibits immune cell signaling, TCR signaling, T cell activation, macrophage phagocytosis, or dendritic cell antigen cross-presentation. In one embodiment, the immune cell inhibitor molecule exerts its inhibitor function via ITIMs or ITSMs. In one embodiment, the molecule of the invention comprises a ligand-binding sequence of the extracellular domain of a T cell co-inhibitory molecule (and is devoid of the transmembrane and intracellular domains containing ITIM or ITSM). In one aspect, the ligand-binding sequence of the extracellular domain of the T cell co-inhibitory molecule serves as a decoy or ligand-trap that binds its cognate ligand(s), thereby preventing ITIM/ITSM signaling by inhibiting the interaction of the ligand with the co-inhibitory molecule on the immune cell. In various examples, the molecule contains a ligand-binding sequence of the extracellular domain of PD-1 (PD1 ECD). In various examples, the molecule contains a ligand-binding sequence of the extracellular domain of TIM3 (TIM3 ECD). In various examples, the molecule contains a ligand-binding sequence of the extracellular domain of BTLA (BTLA ECD). In another aspect, the molecule of the invention comprises a ligand-binding sequence of the extracellular domain of an immune inhibitory molecule that exerts its inhibitory function via ITIMs and/or ITSMs. In various examples, the molecule contains a ligand-binding sequence of the extracellular domain of SIRPa (SIRPa ECD). In various examples, the molecule contains a ligand-binding sequence of the extracellular domain of SIGLEC10 (SIGLEC10 ECD).

[0341] In another embodiment, the molecule of the invention comprises a targeting polypeptide that binds either the immune cell inhibitory receptor or ligand to prevent the interaction leading to ITIM/ITSM-mediated inhibition, fused to one or more receptor ECDs. In one embodiment, the targeting polypeptide is an antibody. In various examples, the targeting polypeptide binds and disables CD24 or SIGLEC10; PD-1 or PD-L1; SIRPa or CD47; TIM-3 or a CEACAM family member that binds TIM-3; BTLA or HVEM. In various examples, the targeting polypeptide is an antibody that binds and disables CD24, SIGLEC10, PD-1, PD-L1, SIRPa, CD47, TIM-3, a CEACAM family member, BTLA, or HVEM.

[0342] As shown in Example 2, antibody-ligand traps containing BTLAecd localize to HVEM-expressing cells and simultaneously counteract BTLA-mediated suppression & promote HVEM-mediated activation of T cells. BTLA ligation by HVEM inhibits T cell activation via SHP-1-mediated inhibition of CD28 and CD3z signaling. HVEM ligation by LIGHT or BTLA (in trans) promotes T cell activation. The antibody ligand traps of the invention comprising a BTLA ecd which binds HVEM, thereby disrupting its interaction with both BTLA and CD160. In addition, ligation of T cell HVEM by BTLAecd of the ALT may promote HVEM-mediated costimulatory signals for T cell activation. PD-1 ligation by PD-1 ligands (PD-L1 or PD-L2) inhibits T cell activation via SHP-2-mediated inhibition of CD28 signaling. The interaction of PD-L1 with PD-1 can be disrupted by antibodies targeting either PD-L1 or PD-1, or a PD1 ecd that binds both PD-L1 and PD-L2. Antibody ligand traps comprising a BTLA ecd fused to an antibody that specifically binds PD-L1, or PD-1 can simultaneously inhibit PD-L1/PD-1 and HVEM/BTLA induced SHP1/2 mediated suppression of CD28 and CD3 signaling. As such, these molecules of the invention can counteract both HVEM/BTLA and PD-L1 mediated immune suppression in the tumor environment, thereby enhancing antitumor immune responses.

[0343] The data in Example 2 demonstrate that BTLA ECD fused to the heavy or light chain of an antibody is capable of binding HVEM, thereby disrupting native BTLA-mediated SHP1/SHP2 inhibition, and promoting HVEM-mediated co-stimulatory signaling. As such, in some embodiments, the fusion proteins of the invention comprise an antibody and BTLA ECD where BTLA ECD is fused to either light chain or heavy chain of antibody. In one aspect, the BTLAecd is fused to the heavy chain of an antibody, with or without a linker. In a further aspect, BTLAecd is fused to the C terminus of immunoglobulin Fc, with or without a linker. In one aspect, BTLAecd is fused to the light chain of an antibody, with or without a linker. In a further aspect, BTLAecd is fused to the C terminus of the light chain, with or without a linker.

[0344] Furthermore, Example 2 demonstrates that inhibition of BTLA/HVEM signaling with a decoy BTLA receptor ECD fused to a polypeptide that binds and disables another immuno-inhibitory molecule is effective in the treatment of cancer. As such, in some embodiments, the fusion proteins of the invention comprise a BTLA ECD and a targeting polypeptide that specifically binds an immune cell inhibitory molecule that inhibits the function of T cells, macrophages and/or dendritic cells. In one aspect, the immune cell inhibitory molecule has an intracellular domain comprising ITIM or ITSM motifs. In one aspect, the inhibitory molecule is a ligand that binds an inhibitory receptor containing ITIM or ITSM motifs. In one aspect, the inhibitory receptor signals via SHP1 or SHP2. In one aspect, the targeting polypeptide inhibits the function of the immune cell inhibitory molecule as an antagonist. In one aspect, the targeting polypeptide is an antibody. In another aspect, the targeting polypeptide is a Fc fusion protein. Examples of the immuno-inhibitory molecules include, but are not limited to the following: CD47, SIRPa, CD24, SIGLEC-10, LILRB, PD-L1, PD-L2, PD1, TIGIT, PVRIG, TIM-3, CEACAM1, CEACAM5.

[0345] Furthermore, Example 2 demonstrates that the decoy BTLA receptor ECD fused to a polypeptide that binds and disables another T cell co-inhibitory molecule is effective in the treatment of cancer. As such, in some fusion proteins, BTLA ECD is fused to a targeting polypeptide that specifically binds a T cell co-inhibitory molecule. In one aspect, the targeting polypeptide inhibits the function of the T cell co-inhibitory molecule. In one aspect, the targeting polypeptide is an antibody. In another aspect, the targeting polypeptide is a Fc fusion protein. Examples of the T cell co-inhibitory molecule include, but are not limited to the following: PD-L1, PD-L2, PD1, CTLA-4, TIGIT, PVRIG, TIM-3, TIM-3 ligand, CEACAM1, CEACAM5, VISTA, VSIG8.

[0346] Furthermore, Example 2 demonstrates that decoy BTLA receptor ECD fused to a polypeptide that inhibits the interaction of a cytokine and its cytokine receptor is effective in the treatment of cancer. As such, in some embodiments of the invention, BTLA ECD is fused to a targeting polypeptide that specifically binds a cytokine or cytokine receptor. In one aspect, the cytokine or cytokine receptor inhibit the function of T cells, macrophages, and/or dendritic cells. In one aspect, the cytokine or cytokine receptor promote tumor angiogenesis. In one aspect, the targeting polypeptide is an antibody. In another aspect, the targeting polypeptide is a ligand-binding sequence of a cytokine receptor extracellular domain. Examples of the cytokine/cytokine receptor include TGFb/TGFbR, IL-17/IL-17R, IL-23/IL-23R, IL-6/IL-6R, IL-1/IL-1R, IL-10/IL-10R, and VEGF/VEGFR.

[0347] Furthermore, Example 2 demonstrates that decoy BTLA receptor ECD fused to a polypeptide that binds a tumor cell surface molecule is effective in the treatment of cancer. As such, in some embodiments of the invention, BTLA ECD is fused to a polypeptide that binds a tumor cell surface molecule. In some embodiments, this tumor cell-surface molecule is a growth factor or growth factor receptor. In other embodiments, this tumor cell surface molecule is a protein that is overexpressed on tumor cells. Examples of the tumor cell surface molecule include PD-L1, EGFR, HER2, EGFRvIII, PSMA, nectin-4, and uPAR. In a particular aspect, the targeting polypeptide is a bispecific antibody. In a further aspect, the bispecific antibody is a CrossMab or a BiTE. In a further aspect, the bispecific antibody binds CD3 and a tumor cell surface molecule. Examples of the bispecific antibody include CD3×HER2 bsAbs and CD3×CEA bsAbs.

[0348] Furthermore, Example 2 demonstrates that decoy BTLA receptor ECD on either the heavy or light chain of the targeting polypeptide is capable of binding HVEM, thereby disrupting native BTLA-mediated SHP1/SHP2 inhibition and promoting HVEM-mediated co-stimulatory signaling, even while another receptor ECD is additionally fused to the antibody. Furthermore, these data demonstrate that decoy BTLA receptor ECD is effective in the treatment of cancer when part of a fusion protein comprising an additional ECD of a cytokine or cytokine receptor. As such, in some embodiments of the invention, the fusion protein comprising BTLA ECD further comprises an additional ECD (ECD #2) selected from: TGFbRII ECD, VEGFR ECD, SIRPa ECD, SIGLEC10 ECD, ECD of a T cell co-inhibitory molecule (e.g., TIM3 ECD, or PD1 ECD). In other embodiments, the fusion protein comprising BTLA ECD further comprises an additional ECD (ECD #2) of a cytokine. In some embodiments, this cytokine is IL-15 or IL-12. In some embodiments, BTLA ECD is fused to the heavy chain or light chain of the targeting antibody and ECD #2 is fused to the heavy or light chain. In some embodiments, ECD #2 is fused to the heavy chain. In other embodiments, ECD #2 is fused to the light chain. In some embodiments, ECD #2 is TGFbRII ECD. In other embodiments, ECD #2 is a ligand-binding fragment of a T cell co-inhibitory molecule. In some embodiments, ECD #2 is TIM3 ECD. In other embodiments, ECD #2 is VEGFR ECD. In other embodiments, ECD #2 is a cytokine receptor ECD. In other embodiments, ECD #2 is the ECD of a receptor whose ligation inhibits phagocytosis. In some embodiments, ECD #2 is SIRPa ECD or SIGLEC10 ECD. In other embodiments, BTLA ECD and ECD #2 are fused together, with or without a linker; with or without an Fc domain between them.

[0349] Furthermore, Example 2 demonstrates that decoy BTLA receptor ECD fused to an antibody can enable recruitment of T cells to tumor cells, since these data show that BTLA ECD can bind HVEM while the targeting antibody simultaneously binds a T cell surface molecule. As such, in some embodiments of the invention, BTLA ECD is fused to an antibody that binds T cells. In some embodiments, the antibody binds CD3. In a particular aspect, the antibody is a bispecific antibody. In a further aspect, the antibody is a bispecific antibody that binds CD3 and another target.

[0350] In various embodiments, the fusion proteins of the invention counteract PD-1/PD-L1 in the tumor microenvironment. In some embodiments, the fusion proteins comprise a ligand-binding sequence of an extracellular domain of PD-1 (e.g., PD1 ECD).

[0351] In one embodiment, the fusion protein of the invention comprises an antibody that binds PD1 or PD-1 ligand. In one example, the ALT comprises an antibody that binds PD1 and interferes with its interaction with PD-1 ligand. In one example, the ALT comprises an antibody that binds PDL1 and interferes with its interaction with PD-1 or B7. In one aspect, the antibody is an antagonist that inhibits PD1/PD1 ligand interaction or intracellular ITIM or ITSM signaling, thereby promoting immune cell activation. In various examples, the antibody that binds PD1 or PD1 ligand is fused to one or more ligand traps. In one example the PD1 or PDL1 antibody is fused to a ligand-binding sequence of the extracellular domain of TIM3 (TIM3 ECD). In one example the PD1 or PDL1 antibody is fused to a ligand-binding sequence of the extracellular domain of TGFbR (TGFbRII ECD). In one example the PD1 or PDL1 antibody is fused to a ligand-binding sequence of the extracellular domain of BTLA (BTLA ECD). In one example the PD1 or PDL1 antibody is fused to a ligand-binding sequence of the extracellular domain of SIRPa (SIRPa ECD). In one example the PD1 or PDL1 antibody is fused to a ligand-binding sequence of the extracellular domain of VEGFR (VEGFR ECD). In one embodiment, the PD1 or PDL1 binding antibody is fused to multiple ligand traps selected from the following: TIM3 ECD, TGFbRII ECD, BTLA ECD, SIRPa ECD, VEGFR ECD. In one aspect, a ligand trap is fused to the heavy chain, and a second ligand trap is fused to the light chain.

[0352] In various examples, the ALT comprises a PD1 or PDL1 binding antibody, wherein the heavy chain is fused to TGFbRII ECD and the light chain is fused to TIM3 ECD or BTLA ECD or SIRPa ECD or SIGLEC10 ECD. In various examples, the ALT comprises a PD1 or PDL1 binding antibody, wherein the heavy chain is fused to TIM3 ECD and the light chain is fused to BTLA ECD or SIRPa ECD or SIGLEC10 ECD. In various examples, the ALT comprises a PD1 or PDL1 binding antibody, wherein the heavy chain is fused to BTLA ECD and the light chain is fused to TIM3 ECD or SIGLEC10 ECD or SIRPa ECD.

[0353] In various examples, the ALT comprises a PD1 or PDL1 binding antibody, wherein the heavy chain is fused to VEGFR ECD and the light chain is fused to TIM3 ECD, SIGLEC10 ECD, SIRPa ECD, or BTLA ECD.

[0354] In one embodiment, the fusion proteins of the invention may comprise a ligand-binding sequence of an extracellular domain of Programmed-Death 1 (PD1). In one aspect, the PD1 ECD binds and disables PD-L1 or PD-L2. In one aspect, the PD1 ECD interferes with the interaction of PD1 ligands with either PD1 or B7.

[0355] In some embodiments, the fusion protein of the invention comprises a targeting polypeptide that is an antibody. In one embodiment, the antibody is fused to PD1 ECD and additional ligand traps selected from the following: TIM3 ECD, TGFbRII ECD, BTLA ECD, SIRPa ECD, VEGFR ECD, SIGLEC10 ECD. In one aspect, a ligand trap (LT1) is fused to the heavy chain, and a second ligand trap (LT2) is fused to the light chain. In one aspect, the PD1 ECD is fused to the heavy chain and another ligand trap is fused to the light chain. In one aspect, the PD1 ECD is fused to the light chain and another ligand trap is fused to the heavy chain. In various examples, the ALT comprises an antibody, wherein the heavy chain is fused to PD1 ECD and the light chain is fused to one of TIM3 ECD, BTLA ECD, SIRPa ECD, or SIGLEC10 ECD. In various examples, the ALT comprises an antibody wherein the light chain is fused to PD1 ECD and the heavy chain is fused to one of TIM3 ECD, TGFbRII ECD, BTLA ECD, SIRPa ECD, VEGFR ECD, SIGLEC10 ECD.

[0356] In some embodiments, the fusion protein comprises PD1 ECD and a polypeptide that inhibits the interaction between CD47 and SIRPa. In one embodiment, this fusion protein comprises PD1 ECD and a polypeptide that binds CD47. In one embodiment, this fusion protein is anti-CD47 mAb fused to PD1 ECD (anti-CD47-PD1 (e.g., SEQ ID NOs: 387, 22)). In another embodiment, this fusion protein comprises SIRPa ECD and PD1 ECD. In one embodiment, this fusion protein is SIRPa-Fc-PD1 (e.g., SEQ ID NO: 548) or PD1-Fc-SIRPa (e.g., SEQ ID NO: 537).

[0357] In a further aspect, the fusion protein comprises PD1 ECD, a polypeptide that inhibits the interaction between CD47 and SIRPa, and another polypeptide that inhibits a T cell co-inhibitory molecule. In some embodiments, this fusion protein comprises anti-CD47 mAb with PD1 ECD fused to the heavy chain or light chain; and a T cell co-inhibitory molecule ECD fused to the other chain.

[0358] In another aspect, the fusion protein comprises PD1 ECD, SIRPa ECD, and an antibody with a heavy chain and light chain. In one aspect, the PD1 ECD is fused to the heavy chain of the antibody and the SIRPa ECD is fused to the light chain of the antibody. In another aspect, the PD1 ECD is fused to the light chain of the antibody and the SIRPa ECD is fused to the heavy chain of the antibody. In some embodiments, the antibody of said fusion protein binds a T cell co-inhibitory molecule as an antagonist. An exemplary embodiment of such a fusion protein includes anti-CTLA4-PD1-SIRPa (e.g., SEQ ID NOs: 440, 438). In other embodiments, the antibody of said fusion protein binds a T cell co-stimulatory molecule as an agonist. Exemplary embodiments of this fusion protein include anti-OX40-PD1-SIRPa (e.g., SEQ ID NOs: 510, 508), anti-41BB-PD1-SIRPa (e.g., SEQ ID NOs: 498, 496), and anti-CD40-PD1-SIRPa. In other embodiments, the antibody of said fusion protein is a tumor-targeted antibody. In some embodiments, this tumor targeted-antibody binds a tumor growth factor or growth factor receptor. In other embodiments, this tumor targeted antibody binds a tumor cell surface molecule. Exemplary embodiments of this fusion protein include anti-EGFR-PD1-SIRPa (e.g., SEQ ID NOs: 225, 223), anti-HER2-PD1-SIRPa (e.g., SEQ ID NOs: 249, 247), anti-EGFRvIII-PD1-SIRPa (e.g., SEQ ID NOs: 237, 235), anti-uPAR-PD1-SIRPa, and anti-PSMA-PD1-SIRPa.

[0359] In other embodiments, the antibody of said fusion protein binds a member of the TGFb pathway. In some embodiments, this antibody binds TGFb, TGFbR, or GARP. Exemplary embodiments of this fusion protein include anti-TGFb-PD1-SIRPa (e.g., SEQ ID NOs: 398, 396), anti-TGFbR-PD1-SIRPa, and anti-GARP-PD1-SIRPa.

[0360] In other embodiments, the antibody of said fusion protein binds VEGF or VEGFR. Exemplary embodiments of this fusion protein include anti-VEGF-PD1-SIRPa (e.g., SEQ ID NOs: 366, 364) and anti-VEGFR-PD1-SIRPa (e.g., SEQ ID NOs: 377, 375).

[0361] In some embodiments, the fusion protein comprises PD1 ECD and a polypeptide that inhibits a T cell co-inhibitory molecule. In specific embodiments, the fusion protein comprises PD1 ECD and an antibody that binds and disables a T cell co-inhibitory molecule. In various examples, the T cell co-inhibitory molecule is CTLA-4, LAG3, TIM-3, CEACAM, CD47, SIRPa, TIGIT, VISTA, VSIG8, PVRIG, or BTLA.

[0362] In some embodiments, the fusion protein comprises PD1 ECD and a polypeptide that inhibits the interaction of TIGIT or PVRIG with PVRL2 or PVR. In some embodiments, this fusion protein comprises an antibody that binds TIGIT or PVRIG fused to PD1 ECD. Exemplary embodiments of this fusion protein include anti-TIGIT-PD1 (e.g., SEQ ID NOs: 474, 139) and anti-PVRIG-PD1.

[0363] In some embodiments, the fusion protein comprises PD1 ECD and a polypeptide that inhibits the interaction of VISTA and VSIG8. In some embodiments, this fusion protein comprises an antibody that binds VISTA or VSIG8 fused to PD1 ECD. Exemplary embodiments of this fusion protein include anti-VISTA-PD1 and anti-VSIG8-PD1.

[0364] In some embodiments, the fusion protein comprises PD1 ECD, an antibody that binds and disables a T cell co-inhibitory molecule, and an additional receptor ECD. In one aspect, the PD1 ECD is fused to the heavy chain of the antibody and the additional receptor ECD is fused to the light chain of the antibody. Alternatively, the PD1 ECD is fused to the light chain and the additional receptor ECD is fused to the heavy chain.

[0365] In other embodiments, the fusion protein comprises PD1 ECD, an antibody that binds and disables a T cell co-inhibitory molecule, and SIRPa ECD. Exemplary embodiments of this fusion protein include anti-PD1-PD1-SIRPa (e.g., SEQ ID NOs: 452, 450); anti-CTLA4-PD1-SIRPa (e.g., SEQ ID NOs: 440, 438); anti-TIGIT-PD1-SIRPa (e.g., SEQ ID NOs: 474, 472); anti-TIM3-PD1-SIRPa (e.g., SEQ ID NOs: 486, 484).

[0366] In other embodiments, the fusion protein comprises PD1 ECD, an antibody that binds and disables a T cell co-inhibitory molecule, and SIGLEC10 ECD. Exemplary embodiments of this fusion protein include anti-TIGIT-PD1-SIGLEC10 (e.g., SEQ ID NOs: 474, 471); anti-PD1-PD1-SIGLEC10 (e.g., SEQ ID NOs: 452, 449); anti-CTLA4-PD1-SIGLEC10 (e.g., SEQ ID NOs: 440, 437); anti-TIM3-PD1-SIGLEC10 (e.g., SEQ ID NOs: 486, 483).

[0367] In some embodiments, the fusion protein comprises an antibody that binds a T cell co-stimulatory molecule fused to PD1. This antibody is preferably an agonist of the T cell co-stimulatory molecule. In some embodiments, this fusion protein is selected from: anti-ICOS-PD1 (e.g., SEQ ID NOs: 522, 59); anti-41BB-PD1 (e.g., SEQ ID NOs: 498, 2); anti-OX40-PD1 (e.g., SEQ ID NOs: 510, 97).

[0368] In a further aspect, the fusion protein comprises an antibody that binds a T cell-costimulatory molecule, PD1 ECD, and an additional receptor ECD. In one aspect, the PD1 ECD is fused to the heavy chain of the antibody and the additional receptor ECD is fused to the light chain of the antibody. Alternatively, the PD1 ECD is fused to the light chain of the antibody and the additional receptor ECD is fused to the heavy chain of the antibody. In some embodiments, the additional receptor ECD is the ECD of a T cell co-inhibitory molecule. In another aspect, the additional receptor ECD is SIRPa ECD. In some embodiments, the fusion protein is selected from: anti-ICOS-PD1-SIRPa (e.g., SEQ ID NOs: 522, 520); anti-OX40-PD1-SIRPa (e.g., SEQ ID NOs: 510, 508); anti-41BB-PD1-SIRPa (e.g., SEQ ID NOs: 498, 496). In another aspect, the additional receptor ECD is SIGLEC10 ECD. In some embodiments, the fusion protein is selected from: anti-OX40-PD1-SIGLEC10 (e.g., SEQ ID NOs: 510, 507); anti-ICOS-PD1-SIGLEC10 (e.g., SEQ ID NOs: 522, 519); anti-41BB-PD1-SIGLEC10 (e.g., SEQ ID NOs: 498, 495).

[0369] In some embodiments, the fusion protein comprises an antibody, PD1 ECD, and the ECD of a T cell co-stimulatory molecule. In one aspect, the PD1 ECD is fused to heavy chain and the ECD of a T cell co-stimulatory molecule fused to light chain. Alternatively, the PD1 ECD is fused to the light chain and the T cell co-stimulatory molecule ECD is fused to the heavy chain. In some embodiments, the fusion protein comprises PD1 ECD and one of the following: OX40L, 41BBL, ICOSL.

[0370] In one embodiment, the fusion protein comprises PD1 ECD and a polypeptide that binds an ectonucleotidase. In a preferred embodiment, the ectonucleotidase is either CD39 or CD73. In some embodiments, the fusion protein is an antibody that binds CD39 or CD73 fused to PD1 ECD; for example: anti-CD39-PD1 (e.g., SEQ ID NOs: 429, 18) or anti-CD73-PD1 (e.g., SEQ ID NOs: 421, 24).

[0371] In some embodiments, the fusion protein comprises PD1 ECD, an antibody that binds CD39 or CD73, and an additional receptor ECD. In some embodiments, the PD1 ECD is fused to the heavy chain of the antibody and the additional receptor ECD is fused to the light chain of the antibody. Alternatively, the PD1 ECD is fused to the light chain of the antibody and the additional receptor ECD is fused to the heavy chain of the antibody. In some embodiments, the fusion protein is selected from the following: anti-CD39-PD1-SIRPa, or anti-CD73-PD1-SIRPa (e.g., SEQ ID NOs: 421, 419).

[0372] In some embodiments, the fusion protein comprises a tumor-targeted antibody and PD1 ECD. In some embodiments, this tumor targeted-antibody binds a tumor growth factor or growth factor receptor. In other embodiments, this tumor targeted antibody binds a tumor cell surface molecule. In some embodiments, this fusion protein is selected from the following: anti-EGFR-PD1 (e.g., SEQ ID NOs: 225, 43), anti-HER2-PD1 (e.g., SEQ ID NOs: 249, 55), anti-EGFRvIII-PD1 (e.g., SEQ ID NOs: 237, 47), anti-uPAR-PD1 (e.g., SEQ ID NOs: 269, 162), anti-PSMA-PD1 (e.g., SEQ ID NOs: 276, 121).

[0373] In a further embodiment, the fusion protein comprises a tumor-targeted antibody, PD1 ECD, and an additional receptor ECD. In one embodiment, the PD1 ECD is fused to the heavy chain of the antibody and the additional receptor ECD is fused to the light chain of the antibody. Alternatively, the PD1 ECD is fused to the light chain and the additional receptor ECD is fused to the heavy chain. In some embodiments, the additional receptor ECD is the ECD of a T cell co-inhibitory molecule. In another aspect, the additional receptor ECD is SIRPa ECD. In some embodiments, the fusion protein is selected from: anti-EGFR-PD1-SIRPa (e.g., SEQ ID NOs: 225, 223); anti-HER2-PD1-SIRPa (e.g., SEQ ID NOs: 249, 247); anti-EGFRvIII-PD1-SIRPa (e.g., SEQ ID NOs: 237, 235); anti-nectin4-PD1-SIRPa (e.g., SEQ ID NOs: 261, 259). In another aspect, the additional receptor ECD is SIGLEC10 ECD. In some embodiments, the fusion protein is selected from: anti-EGFR-PD1-SIGLEC10 (e.g., SEQ ID NOs: 225, 222); anti-nectin4-PD1-SIGLEC10 (e.g., SEQ ID NOs: 261, 258); anti-HER2-PD1-SIGLEC10 (e.g., SEQ ID NOs: 249, 246); anti-EGFRvIII-PD1-SIGLEC10 (e.g., SEQ ID NOs: 237, 234).

[0374] In some embodiments, the fusion protein comprises PD1 ECD and a polypeptide that inhibits VEGF/VEGFR signaling. In some embodiments, the fusion protein comprises PD1 ECD and anti-VEGFR mAb with PD1 ECD fused to either the heavy chain or light chain of the antibody. In some embodiments, this fusion protein is anti-VEGFR-PD1 (e.g., SEQ ID NOs: 377, 148). In a further embodiment, the fusion protein may additionally comprise a receptor ECD fused to the other chain of the antibody. In some embodiments, the fusion protein is selected from anti-VEGFR-PD1-TIM3 (e.g., SEQ ID NOs: 377, 376); anti-VEGFR-PD1-BTLA (e.g., SEQ ID NOs: 377, 378); anti-VEGFR-PD1-SIRPa (e.g., SEQ ID NOs: 377, 375); anti-VEGFR-PD1-SIGLEC10 (e.g., SEQ ID NOs: 377, 374).

[0375] In some embodiments, the fusion protein comprises PD1 ECD and anti-VEGF mAb with PD1 ECD fused to either the heavy chain or light chain of the antibody. In some embodiments, this fusion protein is anti-VEGF-PD1 (e.g., SEQ ID NOs: 366, 32). In a further embodiment, the fusion protein may additionally comprise a receptor ECD fused to the other chain of the antibody. In some embodiments, the fusion protein is selected from anti-VEGF-PD1-BTLA (e.g., SEQ ID NOs: 366, 367); anti-VEGF-PD1-TIM3 (e.g., SEQ ID NOs: 366, 365); anti-VEGF-PD1-SIRPa (e.g., SEQ ID NOs: 366, 364); anti-VEGF-PD1-SIGLEC10 (e.g., SEQ ID NOs: 366, 363).

[0376] In other embodiments, the fusion protein comprises PD1 ECD and VEGFR ECD. In one embodiment, this fusion protein is PD1-Fc-VEGFR (e.g., SEQ ID NO: 540). In another embodiment, this fusion protein is VEGFR-Fc-PD1 (e.g., SEQ ID NO: 566)

[0377] In some embodiments, the fusion protein comprises an antibody that binds IL-17 or IL-17R and PD1 ECD. In some embodiments, this fusion protein is selected from the following: anti-IL17-PD1, anti-IL17R-PD1 (e.g., SEQ ID NOs: 330, 63).

[0378] In a further embodiment, the fusion protein comprises an antibody that binds IL-17 or IL-17R, PD1 ECD, and an additional receptor ECD. In one embodiment, PD1 ECD is fused to the heavy chain of the antibody and the additional receptor ECD is fused to the light chain of the antibody. Alternatively, PD1 ECD is fused to light chain and additional receptor ECD is fused to heavy chain. In some embodiments, the additional receptor ECD is the ECD of a T cell co-inhibitory molecule. In another aspect, the additional receptor ECD is SIRPa ECD. In some embodiments, the fusion protein is selected from: anti-IL17R-PD1-SIRPa (e.g., SEQ ID NOs: 330, 328). In another aspect, the additional receptor ECD is SIGLEC10 ECD. In some embodiments, the fusion protein is selected from: anti-IL17R-PD1-SIGLEC10 (e.g., SEQ ID NOs: 330, 327).

[0379] In some embodiments, the fusion protein comprises an antibody that binds IL-23 or IL-23R and PD1 ECD. If the antibody binds IL-23, it is preferred that the antibody bind the p19 subunit of IL-23 that is not shared with IL-12. In some embodiments, this fusion protein is selected from the following: anti-IL23-PD1 (e.g., SEQ ID NOs: 342, 75), anti-IL23R-PD1.

[0380] In a further embodiment, the fusion protein comprises an antibody that binds IL-23 or IL-23R, PD1 ECD, and an additional receptor ECD. In one embodiment, PD1 ECD is fused to the heavy chain of the antibody and the additional receptor ECD is fused to the light chain of the antibody. Alternatively, PD1 ECD is fused to light chain and additional receptor ECD is fused to heavy chain. In some embodiments, the additional receptor ECD is the ECD of a T cell co-inhibitory molecule. In another aspect, the additional receptor ECD is SIRPa ECD. In some embodiments, the fusion protein is selected from: anti-IL23-PD1-SIRPa (e.g., SEQ ID NOs: 342, 340). In another aspect, the additional receptor ECD is SIGLEC10 ECD. In some embodiments, the fusion protein is selected from: anti-IL23-PD1-SIGLEC10 (e.g., SEQ ID NOs: 342, 339).

[0381] In some embodiments, the fusion protein comprises an antibody that binds IL-6 or IL-6R, PD1 ECD, and an additional receptor ECD. In one embodiment, PD1 ECD is fused to the heavy chain of the antibody and the additional receptor ECD is fused to the light chain of the antibody. Alternatively, PD1 ECD is fused to light chain and additional receptor ECD is fused to heavy chain. In some embodiments, the additional receptor ECD is the ECD of a T cell co-inhibitory molecule. In another aspect, the additional receptor ECD is SIRPa ECD. In some embodiments, the fusion protein is selected from: anti-IL6R-PD1-SIRPa (e.g., SEQ ID NOs: 318, 316). In another aspect, the additional receptor ECD is SIGLEC10 ECD. In some embodiments, the fusion protein is selected from: anti-IL6R-PD1-SIGLEC10 (e.g., SEQ ID NOs: 318, 315).

[0382] In some embodiments, the fusion protein comprises PD1 ECD and an antibody that binds TGFb, TGFbR, or GARP. Exemplary embodiments of this fusion protein include anti-TGFb-PD1 (e.g., SEQ ID NOs: 398, 133), anti-TGFbR-PD1, and anti-GARP-PD1 (e.g., SEQ ID NOs: 411, 49).

[0383] In some embodiments, the fusion protein further comprises an additional receptor ECD. Exemplary embodiments of this fusion protein include anti-TGFb-PD1-SIRPa (e.g., SEQ ID NOs: 398, 396); anti-TGFb-PD1-BTLA (e.g., SEQ ID NOs: 398, 399); anti-TGFb-PD1-SIGLEC10 (e.g., SEQ ID NOs: 398, 395); anti-TGFb-PD1-TIM3 (e.g., SEQ ID NOs: 398, 397).

[0384] In some embodiments, the fusion protein comprises PD1 ECD and IL-15. In some embodiments, the fusion protein is IL15-Fc-PD1 (e.g., SEQ ID NO: 578) or PD1-Fc-IL15 (e.g., SEQ ID NO: 577). In other embodiments, the fusion protein is IL12-Fc-PD1 (e.g., SEQ ID NO: 576) or PD1-Fc-IL12 (e.g., SEQ ID NO: 575). In other embodiments, the fusion protein comprises an antibody with PD1 ECD fused to heavy chain and IL-15 fused to light chain. In other embodiments, the fusion protein comprises an antibody with PD1 ECD fused to heavy chain and IL-12 fused to light chain.

[0385] In various embodiments, the fusion proteins of the invention counteract TIM-3/CEACAM in the tumor microenvironment. In some embodiments, the fusion proteins comprise a ligand-binding sequence of an extracellular domain of TIM-3 (e.g., TIM-3 ECD).

[0386] In one embodiment, the fusion protein is an ALT that comprises an antibody that binds TIM3 or a TIM3 ligand (e.g. CEACAM1). In one example, the ALT comprises an antibody that binds TIM3 and interferes with its interaction with CEACAM1. In one example, the ALT comprises an antibody that binds CEACAM and interferes with its heterodimerization with TIM3 or homodimerization with CEACAM. In one aspect, the antibody is an antagonist that inhibits TIM3/TIM3 ligand interaction or intracellular ITIM or ITSM signaling, thereby promoting immune cell activation. In various examples, the antibody that binds TIM3 or CEACAM is fused to one or more ligand traps. In one example the TIM3 or CEACAM antibody is fused to a ligand-binding sequence of the extracellular domain of PD1 (PD1 ECD). In one example the TIM3 or CEACAM antibody is fused to a ligand-binding sequence of the extracellular domain of TGFbR (TGFbRII ECD). In one example the TIM3 or CEACAM antibody is fused to a ligand-binding sequence of the extracellular domain of BTLA (BTLA ECD). In one example the TIM3 or CEACAM antibody is fused to a ligand-binding sequence of the extracellular domain of SIRPa (SIRPa ECD). In one example the TIM3 or CEACAM antibody is fused to a ligand-binding sequence of the extracellular domain of VEGFR (VEGFR ECD). In one embodiment, the TIM3 or CEACAM binding antibody is fused to multiple ligand traps selected from the following: PD1 ECD, TGFbRII ECD, BTLA ECD, SIRPa ECD, VEGFR ECD, SIGLEC10 ECD. In one aspect, a ligand trap is fused to the heavy chain, and a second ligand trap is fused to the light chain.

[0387] In various examples, the ALT comprises a TIM3 or CEACAM binding antibody, wherein the heavy chain is fused to TGFbRII ECD and the light chain is fused to PD1 ECD, BTLA ECD, SIRPa ECD, or SIGLEC10 ECD. In various examples, the ALT comprises a TIM3 or CEACAM binding antibody, wherein the heavy chain is fused to VEGFR ECD and the light chain is fused to PD1 ECD, BTLA ECD, SIRPa ECD, or SIGLEC10 ECD. In various examples, the ALT comprises a TIM3 or CEACAM binding antibody, wherein the heavy chain is fused to PD1 ECD and the light chain is fused to BTLA ECD, SIRPa ECD, or SIGLEC10 ECD. In various examples, the ALT comprises a TIM3 or CEACAM binding antibody, wherein the heavy chain is fused to BTLA ECD and the light chain is fused to PD1 ECD, SIRPa ECD, or SIGLEC10 ECD. In various examples, the ALT comprises a TIM3 or CEACAM binding antibody, wherein the heavy chain is fused to SIRPa ECD and the light chain is fused to BTLA ECD, PD1 ECD, or SIGLEC10 ECD. In various examples, the ALT comprises a TIM3 or CEACAM binding antibody, wherein the heavy chain is fused to SIGLEC10 ECD and the light chain is fused to BTLA ECD, SIRPa ECD, or PD1 ECD.

[0388] In one embodiment, the fusion proteins of the invention comprise a ligand-binding sequence of an extracellular domain of TIM-3 (TIM3 ECD) to bind and disable TIM-3 ligands (CEACAM1, CEACAM5).

[0389] In some embodiments, the fusion protein of the invention comprises a targeting polypeptide that is an antibody. In one embodiment, the antibody is fused to TIM3 ECD and additional ligand traps selected from the following: PD1 ECD, TGFbRII ECD, BTLA ECD, SIRPa ECD, VEGFR ECD, SIGLEC10 ECD. In one aspect, a ligand trap (LT1) is fused to the heavy chain, and a second ligand trap (LT2) is fused to the light chain. In one aspect, the TIM3 ECD is fused to the heavy chain and another ligand trap is fused to the light chain. In one aspect, the TIM3 ECD is fused to the light chain and another ligand trap is fused to the heavy chain. In various examples, the ALT comprises an antibody, wherein the heavy chain is fused to TIM3 ECD and the light chain is fused to one of PD1 ECD, BTLA ECD, SIRPa ECD, or SIGLEC10 ECD. In various examples, the ALT comprises an antibody wherein the light chain is fused to TIM3 ECD and the heavy chain is fused to one of PD1 ECD, TGFbRII ECD, BTLA ECD, SIRPa ECD, VEGFR ECD, SIGLEC10 ECD.

[0390] In some embodiments, the fusion protein comprises TIM3 ECD and a polypeptide that inhibits the interaction between CD47 and SIRPa. In one embodiment, this fusion protein comprises TIM3 ECD and a polypeptide that binds CD47. In one embodiment, this fusion protein is anti-CD47 mAb fused to TIM3 ECD (anti-CD47-TIM3 (e.g., SEQ ID NOs: 391, 22)). In another embodiment, this fusion protein comprises SIRPa ECD and TIM3 ECD. In one embodiment, this fusion protein is SIRPa-Fc-TIM3 (e.g., SEQ ID NO: 551) or TIM3-Fc-SIRPa (e.g., SEQ ID NO: 562).

[0391] In a further aspect, the fusion protein comprises TIM3 ECD, a polypeptide that inhibits the interaction between CD47 and SIRPa, and another polypeptide that inhibits a T cell co-inhibitory molecule. In some embodiments, this fusion protein comprises anti-CD47 mAb with TIM3 ECD fused to the heavy chain or light chain; and a T cell co-inhibitory molecule ECD fused to the other chain. In a particular embodiment, this fusion protein is anti-CD47-TIM3-PD1 (e.g., SEQ ID NOs: 391, 384).

[0392] In another aspect, the fusion protein comprises TIM3 ECD, anti-CD47 mAb, and VEGFR ECD. In some embodiments, VEGFR ECD is fused to heavy chain of anti-CD47 mAb and TIM3 ECD is fused to light chain of anti-CD47 mAb. In one embodiment, this fusion protein is anti-CD47-VEGFR-TIM3 (e.g., SEQ ID NOs: 392, 386)

[0393] In another aspect, the fusion protein comprises TIM3 ECD, SIRPa ECD, and an antibody with a heavy chain and light chain. In one aspect, the TIM3 ECD is fused to the heavy chain of the antibody and the SIRPa ECD is fused to the light chain of the antibody. In another aspect, the TIM3 ECD is fused to the light chain of the antibody and the SIRPa ECD is fused to the heavy chain of the antibody. In some embodiments, the antibody of said fusion protein binds a T cell co-inhibitory molecule as an antagonist. Exemplary embodiments of such fusion proteins include anti-CTLA4-TIM3-SIRPa (e.g., SEQ ID NOs: 445, 438), anti-PD1-TIM3-SIRPa (e.g., SEQ ID NOs: 457, 450), and anti-PDL1-TIM3-SIRPa (e.g., SEQ ID NOs: 467, 461). In other embodiments, the antibody of said fusion protein binds a T cell co-stimulatory molecule as an agonist. Exemplary embodiments of this fusion protein include anti-OX40-TIM3-SIRPa (e.g., SEQ ID NOs: 515, 508), anti-41BB-TIM3-SIRPa (e.g., SEQ ID NOs: 503, 496), and anti-CD40-TIM3-SIRPa. In other embodiments, the antibody of said fusion protein is a tumor-targeted antibody. In some embodiments, this tumor targeted-antibody binds a tumor growth factor or growth factor receptor. In other embodiments, this tumor targeted antibody binds a tumor cell surface molecule. Exemplary embodiments of this fusion protein include anti-EGFR-TIM3-SIRPa (e.g., SEQ ID NOs: 230, 223), anti-HER2-TIM3-SIRPa (e.g., SEQ ID NOs: 254, 247), anti-EGFRvIII-TIM3-SIRPa (e.g., SEQ ID NOs: 242, 235), anti-uPAR-TIM3-SIRPa, and anti-PSMA-TIM3-SIRPa.

[0394] In other embodiments, the antibody of said fusion protein binds a member of the TGFb pathway. In some embodiments, this antibody binds TGFb, TGFbR, or GARP.

[0395] Exemplary embodiments of this fusion protein include anti-TGFb-TIM3-SIRPa (e.g., SEQ ID NOs: 402, 396), anti-TGFbR-TIM3-SIRPa, and anti-GARP-TIM3-SIRPa.

[0396] In other embodiments, the antibody of said fusion protein binds VEGF or VEGFR. Exemplary embodiments of this fusion protein include anti-VEGF-TIM3-SIRPa (e.g., SEQ ID NOs: 371, 364) and anti-VEGFR-TIM3-SIRPa (e.g., SEQ ID NOs: 382, 375).

[0397] In some embodiments, the fusion protein comprises TIM3 ECD and a polypeptide that inhibits a T cell co-inhibitory molecule. In specific embodiments, the fusion protein comprises TIM3 ECD and an antibody that binds and disables a T cell co-inhibitory molecule.

[0398] In some embodiments, the fusion protein comprises TIM3 ECD and a polypeptide that inhibits the interaction of TIGIT or PVRIG with PVRL2 or PVR. In some embodiments, this fusion protein comprises an antibody that binds TIGIT or PVRIG fused to TIM3 ECD. Exemplary embodiments of this fusion protein include anti-TIGIT-TIM3 (e.g., SEQ ID NOs: 479, 139) and anti-PVRIG-TIM3.

[0399] In some embodiments, the fusion protein comprises TIM3 ECD and a polypeptide that inhibits the interaction of VISTA and VSIG8. In some embodiments, this fusion protein comprises an antibody that binds VISTA or VSIG8 fused to TIM3 ECD. Exemplary embodiments of this fusion protein include anti-VISTA-TIM3 and anti-VSIG8-TIM3.

[0400] In some embodiments, the fusion protein comprises TIM3 ECD and a polypeptide that inhibits the interaction of PD-1 and PD-L1. In some embodiments, this fusion protein comprises an antibody that binds PD-1 or PD-L1 fused to TIM3 ECD. Exemplary embodiments of this fusion protein include anti-PD1-TIM3 (e.g., SEQ ID NOs: 457, 101) and anti-PDL1-TIM3 (e.g., SEQ ID NOs: 467, 109).

[0401] In some embodiments, the fusion protein comprises TIM3 ECD and a polypeptide that inhibits CTLA-4. In some embodiments, this fusion protein comprises an antibody that binds CTLA-4 fused to TIM3 ECD. Exemplary embodiments of this fusion protein include anti-CTLA4-TIM3 (e.g., SEQ ID NOs: 445, 28).

[0402] In some embodiments, the fusion protein comprises TIM3 ECD, an antibody that binds and disables a T cell co-inhibitory molecule, and an additional receptor ECD. In one aspect, the TIM3 ECD is fused to the heavy chain of the antibody and the additional receptor ECD is fused to the light chain of the antibody. Alternatively, the TIM3 ECD is fused to the light chain and the additional receptor ECD is fused to the heavy chain.

[0403] In some embodiments, the fusion protein comprises TIM3 ECD, an antibody that binds and disables a T cell co-inhibitory molecule, and PD1 ECD. Exemplary embodiments of this fusion protein include anti-CTLA4-TIM3-PD1 (e.g., SEQ ID NOs: 445, 436); anti-PD1-TIM3-PD1 (e.g., SEQ ID NOs: 457, 448); anti-TIGIT-TIM3-PD1 (e.g., SEQ ID NOs: 479, 470); anti-TIM3-TIM3-PD1 (e.g., SEQ ID NOs: 491, 482).

[0404] In other embodiments, the fusion protein comprises TIM3 ECD, an antibody that binds and disables a T cell co-inhibitory molecule, and SIRPa ECD. Exemplary embodiments of this fusion protein include anti-PD1-TIM3-SIRPa (e.g., SEQ ID NOs: 457, 450); anti-PDL1-TIM3-SIRPa (e.g., SEQ ID NOs: 467, 461); anti-TIGIT-TIM3-SIRPa (e.g., SEQ ID NOs: 479, 472); anti-CTLA4-TIM3-SIRPa (e.g., SEQ ID NOs: 445, 438); anti-TIM3-TIM3-SIRPa (e.g., SEQ ID NOs: 491, 484).

[0405] In other embodiments, the fusion protein comprises TIM3 ECD, an antibody that binds and disables a T cell co-inhibitory molecule, and SIGLEC10 ECD. Exemplary embodiments of this fusion protein include anti-TIGIT-TIM3-SIGLEC10 (e.g., SEQ ID NOs: 479, 471); anti-TIM3-TIM3-SIGLEC10 (e.g., SEQ ID NOs: 491, 483); anti-PDL1-TIM3-SIGLEC10 (e.g., SEQ ID NOs: 467, 460); anti-CTLA4-TIM3-SIGLEC10 (e.g., SEQ ID NOs: 445, 437); anti-PD1-TIM3-SIGLEC10 (e.g., SEQ ID NOs: 457, 449).

[0406] In other embodiments, the fusion protein comprises TIM3 ECD, an antibody that binds and disables a T cell co-inhibitory molecule, and VEGFR ECD. Exemplary embodiments of this fusion protein include anti-PDL1-VEGFR-TIM3 (e.g., SEQ ID NOs: 468, 462); anti-CTLA4-VEGFR-TIM3 (e.g., SEQ ID NOs: 446, 439); anti-TIM3-VEGFR-TIM3 (e.g., SEQ ID NOs: 492, 485); anti-PD1-VEGFR-TIM3 (e.g., SEQ ID NOs: 458, 451); anti-TIGIT-VEGFR-TIM3 (e.g., SEQ ID NOs: 480, 473)

[0407] In some embodiments, the fusion protein comprises an antibody that binds a T cell co-stimulatory molecule fused to TIM3. This antibody is preferably an agonist of the T cell co-stimulatory molecule. In some embodiments, this fusion protein is selected from: anti-41BB-TIM3 (e.g., SEQ ID NOs: 503, 2); anti-OX40-TIM3 (e.g., SEQ ID NOs: 515, 97); anti-ICOS-TIM3 (e.g., SEQ ID NOs: 527, 59).

[0408] In a further aspect, the fusion protein comprises an antibody that binds a T cell-costimulatory molecule, TIM3 ECD, and an additional receptor ECD. In one aspect, the TIM3 ECD is fused to the heavy chain of the antibody and the additional receptor ECD is fused to the light chain of the antibody. Alternatively, the TIM3 ECD is fused to the light chain of the antibody and the additional receptor ECD is fused to the heavy chain of the antibody. In some embodiments, the additional receptor ECD is the ECD of a T cell co-inhibitory molecule. In one embodiment, the T cell co-inhibitory molecule is PD-1. In some embodiments, the fusion protein is selected from: anti-ICOS-TIM3-PD1 (e.g., SEQ ID NOs: 527, 518); anti-41BB-TIM3-PD1 (e.g., SEQ ID NOs: 503, 494); anti-OX40-TIM3-PD1 (e.g., SEQ ID NOs: 515, 506). In another aspect, the additional receptor ECD is SIRPa ECD. In some embodiments, the fusion protein is selected from: anti-41BB-TIM3-SIRPa (e.g., SEQ ID NOs: 503, 496); anti-ICOS-TIM3-SIRPa (e.g., SEQ ID NOs: 527, 520); anti-OX40-TIM3-SIRPa (e.g., SEQ ID NOs: 515, 508). In another aspect, the additional receptor ECD is SIGLEC10 ECD. In some embodiments, the fusion protein is selected from: anti-ICOS-TIM3-SIGLEC10 (e.g., SEQ ID NOs: 527, 519); anti-41BB-TIM3-SIGLEC10 (e.g., SEQ ID NOs: 503, 495); anti-OX40-TIM3-SIGLEC10 (e.g., SEQ ID NOs: 515, 507).

[0409] In some embodiments, the fusion protein comprises an antibody, TIM3 ECD, and the ECD of a T cell co-stimulatory molecule. In one aspect, the TIM3 ECD is fused to heavy chain and the ECD of a T cell co-stimulatory molecule fused to light chain. Alternatively, the TIM3 ECD is fused to the light chain and the T cell co-stimulatory molecule ECD is fused to the heavy chain. In some embodiments, the fusion protein comprises TIM3 ECD and one of the following: OX40L, 41BBL, ICOSL.

[0410] In one embodiment, the fusion protein comprises TIM3 ECD and a polypeptide that binds an ectonucleotidase. In a preferred embodiment, the ectonucleotidase is either CD39 or CD73. In some embodiments, the fusion protein is an antibody that binds CD39 or CD73 fused to TIM3 ECD; for example: anti-CD39-TIM3 (e.g., SEQ ID NOs: 433, 18) or anti-CD73-TIM3 (e.g., SEQ ID NOs: 426, 24).

[0411] In some embodiments, the fusion protein comprises TIM3 ECD, an antibody that binds CD39 or CD73, and an additional receptor ECD. In some embodiments, the TIM3 ECD is fused to the heavy chain of the antibody and the additional receptor ECD is fused to the light chain of the antibody. Alternatively, the TIM3 ECD is fused to the light chain of the antibody and the additional receptor ECD is fused to the heavy chain of the antibody. In some embodiments, the fusion protein is selected from the following: anti-CD73-TIM3-SIRPa (e.g., SEQ ID NOs: 426, 419); anti-CD73-TIM3-PD1 (e.g., SEQ ID NOs: 426, 417).

[0412] In some embodiments, the fusion protein comprises a tumor-targeted antibody and TIM3 ECD. In some embodiments, this tumor targeted-antibody binds a tumor growth factor or growth factor receptor. In other embodiments, this tumor targeted antibody binds a tumor cell surface molecule. In some embodiments, this fusion protein is selected from the following: anti-EGFR-TIM3 (e.g., SEQ ID NOs: 230, 43), anti-HER2-TIM3 (e.g., SEQ ID NOs: 254, 55), anti-EGFRvIII-TIM3 (e.g., SEQ ID NOs: 242, 47), anti-uPAR-TIM3 (e.g., SEQ ID NOs: 273, 162), anti-PSMA-TIM3 (e.g., SEQ ID NOs: 280, 121), anti-nectin-4-TIM3.

[0413] In a further embodiment, the fusion protein comprises a tumor-targeted antibody, TIM3 ECD, and an additional receptor ECD. In one embodiment, the TIM3 ECD is fused to the heavy chain of the antibody and the additional receptor ECD is fused to the light chain of the antibody. Alternatively, the TIM3 ECD is fused to the light chain and the additional receptor ECD is fused to the heavy chain. In some embodiments, the additional receptor ECD is the ECD of a T cell co-inhibitory molecule. In one embodiment, the T cell co-inhibitory molecule is PD-1. In some embodiments, the fusion protein is selected from: anti-HER2-TIM3-PD1 (e.g., SEQ ID NOs: 254, 245); anti-EGFR-TIM3-PD1 (e.g., SEQ ID NOs: 230, 221); anti-nectin4-TIM3-PD1 (e.g., SEQ ID NOs: 266, 257); anti-EGFRvIII-TIM3-PD1 (e.g., SEQ ID NOs: 242, 233). In another aspect, the additional receptor ECD is SIRPa ECD. In some embodiments, the fusion protein is selected from: anti-EGFR-TIM3-SIRPa (e.g., SEQ ID NOs: 230, 223); anti-nectin4-TIM3-SIRPa (e.g., SEQ ID NOs: 266, 259); anti-HER2-TIM3-SIRPa (e.g., SEQ ID NOs: 254, 247); anti-EGFRvIII-TIM3-SIRPa (e.g., SEQ ID NOs: 242, 235). In another aspect, the additional receptor ECD is SIGLEC10 ECD. In some embodiments, the fusion protein is selected from: anti-HER2-TIM3-SIGLEC10 (e.g., SEQ ID NOs: 254, 246); anti-nectin4-TIM3-SIGLEC10 (e.g., SEQ ID NOs: 266, 258); anti-EGFR-TIM3-SIGLEC10 (e.g., SEQ ID NOs: 230, 222); anti-EGFRvIII-TIM3-SIGLEC10 (e.g., SEQ ID NOs: 242, 234). In another aspect, the additional receptor ECD is VEGFR ECD. In some embodiments, the fusion protein is selected from: anti-EGFR-VEGFR-TIM3 (e.g., SEQ ID NOs: 231, 224); anti-EGFRvIII-VEGFR-TIM3 (e.g., SEQ ID NOs: 243, 236); anti-HER2-VEGFR-TIM3 (e.g., SEQ ID NOs: 255, 248); anti-nectin4-VEGFR-TIM3 (e.g., SEQ ID NOs: 267, 260).

[0414] In some embodiments, the fusion protein comprises TIM3 ECD and a polypeptide that inhibits VEGF/VEGFR signaling.

[0415] In some embodiments, the fusion protein comprises TIM3 ECD and anti-VEGFR mAb with TIM3 ECD fused to either the heavy chain or light chain of the antibody. In some embodiments, this fusion protein is anti-VEGFR-TIM3 (e.g., SEQ ID NOs: 382, 148). In a further embodiment, the fusion protein may additionally comprise a receptor ECD fused to the other chain of the antibody. In some embodiments, the fusion protein is selected from anti-VEGFR-TIM3-BTLA (e.g., SEQ ID NOs: 382, 378); anti-VEGFR-TIM3-SIRPa (e.g., SEQ ID NOs: 382, 375); anti-VEGFR-TIM3-SIGLEC10 (e.g., SEQ ID NOs: 382, 374); anti-VEGFR-TIM3-PD1 (e.g., SEQ ID NOs: 382, 373).

[0416] In some embodiments, the fusion protein comprises TIM3 ECD and anti-VEGF mAb with TIM3 ECD fused to either the heavy chain or light chain of the antibody. In some embodiments, this fusion protein is anti-VEGF-TIM3 (e.g., SEQ ID NOs: 371, 32). In a further embodiment, the fusion protein may additionally comprise a receptor ECD fused to the other chain of the antibody. In some embodiments, the fusion protein is selected from anti-VEGF-TIM3-SIGLEC10 (e.g., SEQ ID NOs: 371, 363); anti-VEGF-TIM3-BTLA (e.g., SEQ ID NOs: 371, 367); anti-VEGF-TIM3-PD1 (e.g., SEQ ID NOs: 371, 362); anti-VEGF-TIM3-SIRPa (e.g., SEQ ID NOs: 371, 364).

[0417] In other embodiments, the fusion protein comprises TIM3 ECD and VEGFR ECD. In one embodiment, this fusion protein is TIM3-Fc-VEGFR (e.g., SEQ ID NO: 564). In another embodiment, this fusion protein is VEGFR-Fc-TIM3 (e.g., SEQ ID NO: 570).

[0418] In some embodiments, the fusion protein comprises an antibody that binds IL-17 or IL-17R and TIM3 ECD. In some embodiments, this fusion protein is selected from the following: anti-IL17-TIM3, anti-IL17R-TIM3 (e.g., SEQ ID NOs: 335, 63).

[0419] In a further embodiment, the fusion protein comprises an antibody that binds IL-17 or IL-17R, TIM3 ECD, and an additional receptor ECD. In one embodiment, TIM3 ECD is fused to the heavy chain of the antibody and the additional receptor ECD is fused to the light chain of the antibody. Alternatively, TIM3 ECD is fused to light chain and additional receptor ECD is fused to heavy chain. In some embodiments, the additional receptor ECD is the ECD of a T cell co-inhibitory molecule. In one embodiment, the T cell co-inhibitory molecule is PD-1. In some embodiments, the fusion protein is selected from: anti-IL17R-TIM3-PD1 (e.g., SEQ ID NOs: 335, 326). In another aspect, the additional receptor ECD is SIRPa ECD. In some embodiments, the fusion protein is selected from: anti-IL17R-TIM3-SIRPa (e.g., SEQ ID NOs: 335, 328). In another aspect, the additional receptor ECD is SIGLEC10 ECD. In some embodiments, the fusion protein is selected from: anti-IL17R-TIM3-SIGLEC10 (e.g., SEQ ID NOs: 335, 327). In another aspect, the additional receptor ECD is VEGFR ECD. In some embodiments, the fusion protein is selected from: anti-IL6R-VEGFR-TIM3 (e.g., SEQ ID NOs: 324, 317).

[0420] In some embodiments, the fusion protein comprises an antibody that binds IL-23 or IL-23R and TIM3 ECD. If the antibody binds IL-23, it is preferred that the antibody bind the p19 subunit of IL-23 that is not shared with IL-12. In some embodiments, this fusion protein is selected from the following: anti-IL23-TIM3 (e.g., SEQ ID NOs: 347, 75), anti-IL23R-TIM3.

[0421] In a further embodiment, the fusion protein comprises an antibody that binds IL-23 or IL-23R, TIM3 ECD, and an additional receptor ECD. In one embodiment, TIM3 ECD is fused to the heavy chain of the antibody and the additional receptor ECD is fused to the light chain of the antibody. Alternatively, TIM3 ECD is fused to light chain and additional receptor ECD is fused to heavy chain. In some embodiments, the additional receptor ECD is the ECD of a T cell co-inhibitory molecule. In one embodiment, the T cell co-inhibitory molecule is PD-1. In some embodiments, the fusion protein is selected from: anti-IL23-TIM3-PD1 (e.g., SEQ ID NOs: 347, 338). In another aspect, the additional receptor ECD is SIRPa ECD. In some embodiments, the fusion protein is selected from: anti-IL23-TIM3-SIRPa (e.g., SEQ ID NOs: 347, 340). In another aspect, the additional receptor ECD is SIGLEC10 ECD. In some embodiments, the fusion protein is selected from: anti-IL23-TIM3-SIGLEC10 (e.g., SEQ ID NOs: 347, 339). In another aspect, the additional receptor ECD is VEGFR ECD. In some embodiments, the fusion protein is selected from: anti-IL23-VEGFR-TIM3 (e.g., SEQ ID NOs: 348, 341).

[0422] In some embodiments, the fusion protein comprises an antibody that binds IL-6 or IL-6R and TIM3 ECD. In some embodiments, this fusion protein is selected from the following: anti-IL6-TIM3, anti-IL6R-TIM3 (e.g., SEQ ID NOs: 323, 79).

[0423] In some embodiments, the fusion protein comprises an antibody that binds IL-6 or IL-6R, TIM3 ECD, and an additional receptor ECD. In one embodiment, TIM3 ECD is fused to the heavy chain of the antibody and the additional receptor ECD is fused to the light chain of the antibody. Alternatively, TIM3 ECD is fused to light chain and additional receptor ECD is fused to heavy chain. In some embodiments, the additional receptor ECD is the ECD of a T cell co-inhibitory molecule. In one embodiment, the T cell co-inhibitory molecule is PD-1. In some embodiments, the fusion protein is selected from: anti-IL6R-TIM3-PD1 (e.g., SEQ ID NOs: 323, 314). In another aspect, the additional receptor ECD is SIRPa ECD. In some embodiments, the fusion protein is selected from: anti-IL6R-TIM3-SIRPa (e.g., SEQ ID NOs: 323, 316). In another aspect, the additional receptor ECD is SIGLEC10 ECD. In some embodiments, the fusion protein is selected from: anti-IL6R-TIM3-SIGLEC10 (e.g., SEQ ID NOs: 323, 315). In another aspect, the additional receptor ECD is VEGFR ECD. In some embodiments, the fusion protein is selected from: anti-IL6R-VEGFR-TIM3 (e.g., SEQ ID NOs: 324, 317).

[0424] In some embodiments, the fusion protein comprises TIM3 ECD and an antibody that binds TGFb, TGFbR, or GARP. Exemplary embodiments of this fusion protein include anti-TGFb-TIM3 (e.g., SEQ ID NOs: 402, 133), anti-TGFbR-TIM3, and anti-GARP-TIM3 (e.g., SEQ ID NOs: 414, 49).

[0425] In some embodiments, the fusion protein further comprises an additional receptor ECD. Exemplary embodiments of this fusion protein include anti-TGFb-TIM3-SIGLEC10 (e.g., SEQ ID NOs: 402, 395); anti-TGFb-TIM3-BTLA (e.g., SEQ ID NOs: 402, 399); anti-TGFb-TIM3-PD1 (e.g., SEQ ID NOs: 402, 394); anti-TGFb-TIM3-SIRPa (e.g., SEQ ID NOs: 402, 396).

[0426] In some embodiments, the fusion protein comprises TIM3 ECD and IL-15. In some embodiments, the fusion protein is IL15-Fc-TIM3 (e.g., SEQ ID NO: 594) or TIM3-Fc-IL15 (e.g., SEQ ID NO: 593). In other embodiments, the fusion protein is IL12-Fc-TIM3 (e.g., SEQ ID NO: 592) or TIM3-Fc-IL12 (e.g., SEQ ID NO: 591). In other embodiments, the fusion protein comprises an antibody with TIM3 ECD fused to heavy chain and IL-15 fused to light chain. In other embodiments, the fusion protein comprises an antibody with TIM3 ECD fused to heavy chain and IL-12 fused to light chain.

[0427] In various embodiments, the fusion proteins of the invention counteract BTLA/HVEM in the tumor microenvironment. In some embodiments, the fusion proteins comprise a ligand-binding sequence of an extracellular domain of BTLA (e.g., BTLA ECD).

[0428] In one embodiment, the fusion protein of the invention is an ALT comprising an antibody that binds BTLA or BTLA ligand (e.g. HVEM). In one example, the ALT comprises an antibody that binds BTLA and interferes with its interaction with HVEM. In one example, the ALT comprises an antibody that binds HVEM and interferes with its interaction with BTLA. In one aspect, the antibody is an antagonist that inhibits BTLA intracellular ITIM or ITSM signaling, thereby promoting immune cell activation. In various examples, the antibody that binds BTLA or HVEM is fused to one or more ligand traps. In one example the BTLA or HVEM antibody is fused to a ligand-binding sequence of the extracellular domain of PD1 (PD1 ECD). In one example the BTLA or HVEM antibody is fused to a ligand-binding sequence of the extracellular domain of TGFbR (TGFbRII ECD). In one example the BTLA or HVEM antibody is fused to a ligand-binding sequence of the extracellular domain of TIM3 (TIM3 ECD). In one example the BTLA or HVEM antibody is fused to a ligand-binding sequence of the extracellular domain of SIRPa (SIRPa ECD). In one example the BTLA or HVEM antibody is fused to a ligand-binding sequence of the extracellular domain of VEGFR (VEGFR ECD). In one embodiment, the BTLA or HVEM binding antibody is fused to multiple ligand traps selected from the following: PD1 ECD, TGFbRII ECD, TIM3 ECD, SIRPa ECD, VEGFR ECD. In one aspect, a ligand trap (LT1) is fused to the heavy chain, and a second ligand trap (LT2) is fused to the light chain.

[0429] In various examples, the ALT comprises a BTLA or HVEM binding antibody, wherein the heavy chain is fused to TGFbRII ECD and the light chain is fused to PD1 ECD, TIM3 ECD, SIRPa ECD, or SIGLEC10 ECD. In various examples, the ALT comprises a BTLA or HVEM binding antibody, wherein the heavy chain is fused to VEGFR ECD and the light chain is fused to PD1 ECD, TIM3 ECD, SIRPa ECD, or SIGLEC10 ECD. In various examples, the ALT comprises a BTLA or HVEM binding antibody, wherein the heavy chain is fused to PD1 ECD and the light chain is fused to TIM3 ECD, SIRPa ECD, or SIGLEC10 ECD. In various examples, the ALT comprises a BTLA or HVEM binding antibody, wherein the heavy chain is fused to TIM3 ECD and the light chain is fused to PD1 ECD, SIRPa ECD, or SIGLEC10 ECD. In various examples, the ALT comprises a BTLA or HVEM binding antibody, wherein the heavy chain is fused to SIRPa ECD and the light chain is fused to TIM3 ECD, PD1 ECD, or SIGLEC10 ECD. In various examples, the ALT comprises a BTLA or HVEM binding antibody, wherein the heavy chain is fused to SIGLEC10 ECD and the light chain is fused to TIM3 ECD, SIRPa ECD, or PD1 ECD. In another embodiment, the molecule contains a ligand-binding sequence of the extracellular domain of TIM3 (TIM3 ECD). In one aspect, the TIM3 ECD binds and disables TIM3 ligands (e.g. CEACAM1). In one aspect, the TIM3 ECD interferes with the interaction of TIM3 with CEACAM1 or homodimerization of CEACAM1.

[0430] In one embodiment, the fusion protein comprises a ligand-binding sequence of an extracellular domain of B- and T-lymphocyte attenuator (BTLA ECD). In some embodiments, the fusion protein comprises an antibody and BTLA ECD. In one embodiment, the BTLA ECD is fused to the heavy chain of the antibody. In another embodiment, the BTLA ECD is fused to the light chain of the antibody.

[0431] In some embodiments, the fusion protein of the invention comprises a targeting polypeptide that is an antibody. In one embodiment, the antibody is fused to BTLA ECD and additional ligand traps selected from the following: PD1 ECD, TGFbRII ECD, TIM3 ECD, SIRPa ECD, VEGFR ECD, SIGLEC10 ECD. In one aspect, a ligand trap (LT1) is fused to the heavy chain, and a second ligand trap (LT2) is fused to the light chain. In one aspect, the BTLA ECD is fused to the heavy chain and another ligand trap is fused to the light chain. In one aspect, the BTLA ECD is fused to the light chain and another ligand trap is fused to the heavy chain. In various examples, the ALT comprises an antibody, wherein the heavy chain is fused to TIM3 ECD and the light chain is fused to one of PD1 ECD, TIM3 ECD, SIRPa ECD, or SIGLEC10 ECD. In various examples, the ALT comprises an antibody wherein the light chain is fused to TIM3 ECD and the heavy chain is fused to one of PD1 ECD, TGFbRII ECD, TIM3 ECD, SIRPa ECD, VEGFR ECD, SIGLEC10 ECD.

[0432] In some embodiments, the fusion protein comprises BTLA ECD and a polypeptide that inhibits the interaction between CD47 and SIRPa. In one embodiment, this fusion protein comprises BTLA ECD and a polypeptide that binds CD47. In one embodiment, this fusion protein is anti-CD47 mAb fused to BTLA ECD (anti-CD47-BTLA (e.g., SEQ ID NOs: 383, 22)). In another embodiment, this fusion protein comprises SIRPa ECD and BTLA ECD. In one embodiment, this fusion protein is SIRPa-Fc-BTLA (e.g., SEQ ID NO: 547) or BTLA-Fc-SIRPa (e.g., SEQ ID NO: 531).

[0433] In a further aspect, the fusion protein comprises BTLA ECD, a polypeptide that inhibits the interaction between CD47 and SIRPa, and another polypeptide that inhibits a T cell co-inhibitory molecule. In some embodiments, this fusion protein comprises anti-CD47 mAb with BTLA ECD fused to the heavy chain or light chain; and a T cell co-inhibitory molecule ECD fused to the other chain. In a particular embodiment, this fusion protein is anti-CD47-BTLA-PD1 (e.g., SEQ ID NOs: 383, 384). In another embodiment, this fusion protein is anti-CD47-BTLA-TIM3 (e.g., SEQ ID NOs: 383, 386).

[0434] In another aspect, the fusion protein comprises BTLA ECD, anti-CD47 mAb, and VEGFR ECD. In some embodiments, VEGFR ECD is fused to heavy chain of anti-CD47 mAb and BTLA ECD is fused to light chain of anti-CD47 mAb. In one embodiment, this fusion protein is anti-CD47-VEGFR-BTLA (e.g., SEQ ID NOs: 392, 388).

[0435] In another aspect, the fusion protein comprises BTLA ECD, SIRPa ECD, and an antibody with a heavy chain and light chain. In one aspect, the BTLA ECD is fused to the heavy chain of the antibody and the SIRPa ECD is fused to the light chain of the antibody. In another aspect, the BTLA ECD is fused to the light chain of the antibody and the SIRPa ECD is fused to the heavy chain of the antibody. In some embodiments, the antibody of said fusion protein binds a T cell co-inhibitory molecule as an antagonist. Exemplary embodiments of such fusion proteins include anti-CTLA4-BTLA-SIRPa (e.g., SEQ ID NOs: 435, 438), anti-PD1-BTLA-SIRPa (e.g., SEQ ID NOs: 447, 450), and anti-PDL1-BTLA-SIRPa (e.g., SEQ ID NOs: 459, 461). In other embodiments, the antibody of said fusion protein binds a T cell co-stimulatory molecule as an agonist. Exemplary embodiments of this fusion protein include anti-OX40-BTLA-SIRPa (e.g., SEQ ID NOs: 505, 508), anti-41BB-BTLA-SIRPa (e.g., SEQ ID NOs: 493, 496), and anti-CD40-BTLA-SIRPa. In other embodiments, the antibody of said fusion protein is a tumor-targeted antibody. In some embodiments, this tumor targeted-antibody binds a tumor growth factor or growth factor receptor. In other embodiments, this tumor targeted antibody binds a tumor cell surface molecule. Exemplary embodiments of this fusion protein include anti-EGFR-BTLA-SIRPa (e.g., SEQ ID NOs: 220, 223), anti-HER2-BTLA-SIRPa (e.g., SEQ ID NOs: 244, 247), anti-EGFRvIII-BTLA-SIRPa (e.g., SEQ ID NOs: 232, 235), anti-uPAR-BTLA-SIRPa, and anti-PSMA-BTLA-SIRPa.

[0436] In other embodiments, the antibody of said fusion protein binds a member of the TGFb pathway. In some embodiments, this antibody binds TGFb, TGFbR, or GARP. Exemplary embodiments of this fusion protein include anti-TGFb-BTLA-SIRPa (e.g., SEQ ID NOs: 393, 396), anti-TGFbR-BTLA-SIRPa, and anti-GARP-BTLA-SIRPa.

[0437] In other embodiments, the antibody of said fusion protein binds VEGF or VEGFR. Exemplary embodiments of this fusion protein include anti-VEGF-BTLA-SIRPa (e.g., SEQ ID NOs: 361, 364) and anti-VEGFR-BTLA-SIRPa (e.g., SEQ ID NOs: 372, 375).

[0438] In some embodiments, the fusion protein comprises BTLA ECD and a polypeptide that inhibits a T cell co-inhibitory molecule. In specific embodiments, the fusion protein comprises BTLA ECD and an antibody that binds and disables a T cell co-inhibitory molecule.

[0439] In some embodiments, the fusion protein comprises BTLA ECD and a polypeptide that inhibits the interaction of TIGIT or PVRIG with PVRL2 or PVR. In some embodiments, this fusion protein comprises an antibody that binds TIGIT or PVRIG fused to BTLA ECD. Exemplary embodiments of this fusion protein include anti-TIGIT-BTLA (e.g., SEQ ID NOs: 469, 139) and anti-PVRIG-BTLA.

[0440] In some embodiments, the fusion protein comprises BTLA ECD and a polypeptide that inhibits the interaction of VISTA and VSIG8. In some embodiments, this fusion protein comprises an antibody that binds VISTA or VSIG8 fused to BTLA ECD. Exemplary embodiments of this fusion protein include anti-VISTA-BTLA and anti-VSIG8-BTLA.

[0441] In some embodiments, the fusion protein comprises BTLA ECD and a polypeptide that inhibits the interaction of PD-1 and PD-L1. In some embodiments, this fusion protein comprises an antibody that binds PD-1 or PD-L1 fused to BTLA ECD. Exemplary embodiments of this fusion protein include anti-PD1-BTLA (e.g., SEQ ID NOs: 447, 101) and anti-PDL1-BTLA (e.g., SEQ ID NOs: 459, 109) and anti-PDL1-TGFbRII-BTLA (e.g., SEQ ID NOs: 466, 464). In other embodiments, the polypeptide that inhibits the interaction of PD-1/PD-L1 is PD1 ECD. In one aspect, the fusion protein comprises Fc, BTLA ECD, and PD-1 ECD; and has the structure N-BTLA ECD-Fc-PD1 ECD-C, or N-PD1 ECD-Fc-BTLA ECD.

[0442] In some embodiments, the fusion protein comprises BTLA ECD and a polypeptide that inhibits CTLA-4. In some embodiments, this fusion protein comprises an antibody that binds CTLA-4 fused to BTLA ECD. Exemplary embodiments of this fusion protein include anti-CTLA4-BTLA (e.g., SEQ ID NOs: 435, 28).

[0443] In some embodiments, the fusion protein comprises BTLA ECD and a polypeptide that inhibits TIM-3. In some embodiments, this fusion protein comprises an antibody that binds TIM-3 fused to BTLA ECD. Exemplary embodiments of this fusion protein include anti-TIM3-BTLA (e.g., SEQ ID NOs: 481, 141).

[0444] In some embodiments, the fusion protein comprises BTLA ECD and a polypeptide that binds CEACAM1 and/or CEACAM5. In some embodiments, this fusion protein comprises an antibody that binds CEACAM1 or CEACAM5 fused to BTLA ECD. Exemplary embodiments of this fusion protein include anti-CEACAM5-BTLA (e.g., SEQ ID NOs: 282, 26). In other embodiments, this CEACAM-binding polypeptide is TIM3 ECD.

[0445] Fusion proteins comprising BTLA ECD and mAb that inhibits a T cell co-inhibitory molecule and additional receptor ECD

[0446] In some embodiments, the fusion protein comprises BTLA ECD, an antibody that binds and disables a T cell co-inhibitory molecule, and an additional receptor ECD. In one aspect, the BTLA ECD is fused to the heavy chain of the antibody and the additional receptor ECD is fused to the light chain of the antibody. Alternatively, the BTLA ECD is fused to the light chain and the additional receptor ECD is fused to the heavy chain.

[0447] In some embodiments, the fusion protein comprises BTLA ECD, an antibody that binds and disables a T cell co-inhibitory molecule, and PD1 ECD. In some embodiments, BTLA is fused to the light chain and PD-1 is fused to the heavy chain. In other embodiments, BTLA is fused to the heavy chain and PD-1 is fused to the light chain. Exemplary embodiments of this fusion protein include anti-PD1-BTLA-PD1 (e.g., SEQ ID NOs: 447, 448); anti-CTLA4-BTLA-PD1 (e.g., SEQ ID NOs: 435, 436); anti-TIGIT-BTLA-PD1 (e.g., SEQ ID NOs: 469, 470); anti-TIM3-BTLA-PD1 (e.g., SEQ ID NOs: 481, 482).

[0448] In other embodiments, the fusion protein comprises BTLA ECD, an antibody that binds and disables a T cell co-inhibitory molecule, and TIM3 ECD. Exemplary embodiments of this fusion protein include anti-TIM3-BTLA-TIM3 (e.g., SEQ ID NOs: 481, 485); anti-CTLA4-BTLA-TIM3 (e.g., SEQ ID NOs: 435, 439); anti-TIGIT-BTLA-TIM3 (e.g., SEQ ID NOs: 469, 473); anti-PDL1-BTLA-TIM3 (e.g., SEQ ID NOs: 459, 462); anti-PD1-BTLA-TIM3 (e.g., SEQ ID NOs: 447, 451).

[0449] In other embodiments, the fusion protein comprises BTLA ECD, an antibody that binds and disables a T cell co-inhibitory molecule, and SIRPa ECD. Exemplary embodiments of this fusion protein include anti-TIGIT-BTLA-SIRPa (e.g., SEQ ID NOs: 469, 472); anti-PDL1-BTLA-SIRPa (e.g., SEQ ID NOs: 459, 461); anti-CTLA4-BTLA-SIRPa (e.g., SEQ ID NOs: 435, 438); anti-TIM3-BTLA-SIRPa (e.g., SEQ ID NOs: 481, 484); anti-PD1-BTLA-SIRPa (e.g., SEQ ID NOs: 447, 450).

[0450] In other embodiments, the fusion protein comprises BTLA ECD, an antibody that binds and disables a T cell co-inhibitory molecule, and SIGLEC10 ECD. Exemplary embodiments of this fusion protein include anti-CTLA4-BTLA-SIGLEC10 (e.g., SEQ ID NOs: 435, 437); anti-TIM3-BTLA-SIGLEC10 (e.g., SEQ ID NOs: 481, 483); anti-TIGIT-BTLA-SIGLEC10 (e.g., SEQ ID NOs: 469, 471); anti-PD1-BTLA-SIGLEC10 (e.g., SEQ ID NOs: 447, 449); anti-PDL1-BTLA-SIGLEC10 (e.g., SEQ ID NOs: 459, 460).

[0451] In other embodiments, the fusion protein comprises BTLA ECD, an antibody that binds and disables a T cell co-inhibitory molecule, and VEGFR ECD. Exemplary embodiments of this fusion protein include anti-TIGIT-VEGFR-BTLA (e.g., SEQ ID NOs: 480, 475); anti-TIM3-VEGFR-BTLA (e.g., SEQ ID NOs: 492, 487); anti-PDL1-VEGFR-BTLA (e.g., SEQ ID NOs: 468, 464); anti-PD1-VEGFR-BTLA (e.g., SEQ ID NOs: 458, 453); anti-CTLA4-VEGFR-BTLA (e.g., SEQ ID NOs: 446, 441).

[0452] In some embodiments, the fusion protein comprises an antibody that binds a T cell co-stimulatory molecule fused to BTLA. This antibody is preferably an agonist of the T cell co-stimulatory molecule. In some embodiments, this fusion protein is selected from: anti-41BB-BTLA (e.g., SEQ ID NOs: 493, 2); anti-ICOS-BTLA (e.g., SEQ ID NOs: 517, 59); anti-OX40-BTLA (e.g., SEQ ID NOs: 505, 97).

[0453] In a further aspect, the fusion protein comprises an antibody that binds a T cell-costimulatory molecule, BTLA ECD, and an additional receptor ECD. In one aspect, the BTLA ECD is fused to the heavy chain of the antibody and the additional receptor ECD is fused to the light chain of the antibody. Alternatively, the BTLA ECD is fused to the light chain of the antibody and the additional receptor ECD is fused to the heavy chain of the antibody. In some embodiments, the additional receptor ECD is the ECD of a T cell co-inhibitory molecule. In one embodiment, the T cell co-inhibitory molecule is PD-1. In some embodiments, the fusion protein is selected from: anti-OX40-BTLA-PD1 (e.g., SEQ ID NOs: 505, 506); anti-ICOS-BTLA-PD1 (e.g., SEQ ID NOs: 517, 518); anti-41BB-BTLA-PD1 (e.g., SEQ ID NOs: 493, 494). In another embodiment, the T cell co-inhibitory molecule is TIM3. In some embodiments, the fusion protein is selected from: anti-ICOS-BTLA-TIM3 (e.g., SEQ ID NOs: 517, 521); anti-41BB-BTLA-TIM3 (e.g., SEQ ID NOs: 493, 497); anti-OX40-BTLA-TIM3 (e.g., SEQ ID NOs: 505, 509). In another aspect, the additional receptor ECD is SIRPa ECD. In some embodiments, the fusion protein is selected from: anti-ICOS-BTLA-SIRPa (e.g., SEQ ID NOs: 517, 520); anti-OX40-BTLA-SIRPa (e.g., SEQ ID NOs: 505, 508); anti-41BB-BTLA-SIRPa (e.g., SEQ ID NOs: 493, 496). In another aspect, the additional receptor ECD is SIGLEC10 ECD. In some embodiments, the fusion protein is selected from: anti-41BB-BTLA-SIGLEC10 (e.g., SEQ ID NOs: 493, 495); anti-ICOS-BTLA-SIGLEC10 (e.g., SEQ ID NOs: 517, 519); anti-OX40-BTLA-SIGLEC10 (e.g., SEQ ID NOs: 505, 507).

[0454] Fusion proteins comprising BTLA ECD and mAb and T cell co-stimulatory ECD

[0455] In some embodiments, the fusion protein comprises an antibody, BTLA ECD, and the ECD of a T cell co-stimulatory molecule. In one aspect, the BTLA ECD is fused to heavy chain and the ECD of a T cell co-stimulatory molecule fused to light chain. Alternatively, the BTLA ECD is fused to the light chain and the T cell co-stimulatory molecule ECD is fused to the heavy chain. In some embodiments, the fusion protein comprises BTLA ECD and one of the following: OX40L, 41BBL, ICOSL.

[0456] In one embodiment, the fusion protein comprises BTLA ECD and a polypeptide that binds an ectonucleotidase. In a preferred embodiment, the ectonucleotidase is either CD39 or CD73. In some embodiments, the fusion protein is an antibody that binds CD39 or CD73 fused to BTLA ECD; for example: anti-CD39-BTLA (e.g., SEQ ID NOs: 428, 18) or anti-CD73-BTLA (e.g., SEQ ID NOs: 416, 24).

[0457] In some embodiments, the fusion protein comprises BTLA ECD, an antibody that binds CD39 or CD73, and an additional receptor ECD. In some embodiments, the BTLA ECD is fused to the heavy chain of the antibody and the additional receptor ECD is fused to the light chain of the antibody. Alternatively, the BTLA ECD is fused to the light chain of the antibody and the additional receptor ECD is fused to the heavy chain of the antibody. In some embodiments, the fusion protein is selected from the following: anti-CD73-BTLA-SIRPa (e.g., SEQ ID NOs: 416, 419); anti-CD73-BTLA-TIM3 (e.g., SEQ ID NOs: 416, 420); anti-CD73-BTLA-PD1 (e.g., SEQ ID NOs: 416, 417).

[0458] In some embodiments, the fusion protein comprises a tumor-targeted antibody and BTLA ECD. In some embodiments, this tumor targeted-antibody binds a tumor growth factor or growth factor receptor. In other embodiments, this tumor targeted antibody binds a tumor cell surface molecule. In some embodiments, this fusion protein is selected from the following: anti-EGFR-BTLA (e.g., SEQ ID NOs: 220, 43), anti-HER2-BTLA (e.g., SEQ ID NOs: 244, 55), anti-EGFRvIII-BTLA (e.g., SEQ ID NOs: 232, 47), anti-uPAR-BTLA (e.g., SEQ ID NOs: 268, 162), anti-PSMA-BTLA (e.g., SEQ ID NOs: 275, 121), anti-nectin-4-BTLA.

[0459] In a further embodiment, the fusion protein comprises a tumor-targeted antibody, BTLA ECD, and an additional receptor ECD. In one embodiment, the BTLA ECD is fused to the heavy chain of the antibody and the additional receptor ECD is fused to the light chain of the antibody. Alternatively, the BTLA ECD is fused to the light chain and the additional receptor ECD is fused to the heavy chain. In some embodiments, the additional receptor ECD is the ECD of a T cell co-inhibitory molecule. In one embodiment, the T cell co-inhibitory molecule is PD-1. In some embodiments, the fusion protein is selected from: anti-HER2-BTLA-PD1 (e.g., SEQ ID NOs: 244, 245); anti-EGFR-BTLA-PD1 (e.g., SEQ ID NOs: 220, 221); anti-EGFRvIII-BTLA-PD1 (e.g., SEQ ID NOs: 232, 233); anti-nectin4-BTLA-PD1 (e.g., SEQ ID NOs: 256, 257). In another embodiment, the T cell co-inhibitory molecule is TIM3. In some embodiments, the fusion protein is selected from: anti-EGFRvIII-BTLA-TIM3 (e.g., SEQ ID NOs: 232, 236); anti-nectin4-BTLA-TIM3 (e.g., SEQ ID NOs: 256, 260); anti-EGFR-BTLA-TIM3 (e.g., SEQ ID NOs: 220, 224); anti-HER2-BTLA-TIM3 (e.g., SEQ ID NOs: 244, 248). In another aspect, the additional receptor ECD is SIRPa ECD. In some embodiments, the fusion protein is selected from: anti-EGFRvIII-BTLA-SIRPa (e.g., SEQ ID NOs: 232, 235); anti-nectin4-BTLA-SIRPa (e.g., SEQ ID NOs: 256, 259); anti-HER2-BTLA-SIRPa (e.g., SEQ ID NOs: 244, 247); anti-EGFR-BTLA-SIRPa (e.g., SEQ ID NOs: 220, 223). In another aspect, the additional receptor ECD is SIGLEC10 ECD. In some embodiments, the fusion protein is selected from: anti-EGFR-BTLA-SIGLEC10 (e.g., SEQ ID NOs: 220, 222); anti-nectin4-BTLA-SIGLEC10 (e.g., SEQ ID NOs: 256, 258); anti-HER2-BTLA-SIGLEC10 (e.g., SEQ ID NOs: 244, 246); anti-EGFRvIII-BTLA-SIGLEC10 (e.g., SEQ ID NOs: 232, 234). In another aspect, the additional receptor ECD is VEGFR ECD. In some embodiments, the fusion protein is selected from: anti-nectin4-VEGFR-BTLA (e.g., SEQ ID NOs: 267, 262); anti-EGFR-VEGFR-BTLA (e.g., SEQ ID NOs: 231, 226); anti-HER2-VEGFR-BTLA (e.g., SEQ ID NOs: 255, 250); anti-EGFRvIII-VEGFR-BTLA (e.g., SEQ ID NOs: 243, 238).

[0460] In some embodiments, the fusion protein comprises BTLA ECD and a polypeptide that inhibits VEGF/VEGFR signaling.

[0461] In some embodiments, the fusion protein comprises BTLA ECD and anti-VEGFR mAb with BTLA ECD fused to either the heavy chain or light chain of the antibody. In some embodiments, this fusion protein is anti-VEGFR-BTLA (e.g., SEQ ID NOs: 372, 148). In a further embodiment, the fusion protein may additionally comprise a receptor ECD fused to the other chain of the antibody. In some embodiments, the fusion protein is selected from anti-VEGFR-BTLA-SIRPa (e.g., SEQ ID NOs: 372, 375); anti-VEGFR-BTLA-PD1 (e.g., SEQ ID NOs: 372, 373); anti-VEGFR-BTLA-TIM3 (e.g., SEQ ID NOs: 372, 376); anti-VEGFR-BTLA-SIGLEC10 (e.g., SEQ ID NOs: 372, 374).

[0462] In some embodiments, the fusion protein comprises BTLA ECD and anti-VEGF mAb with BTLA ECD fused to either the heavy chain or light chain of the antibody. In some embodiments, this fusion protein is anti-VEGF-BTLA (e.g., SEQ ID NOs: 361, 32). In a further embodiment, the fusion protein may additionally comprise a receptor ECD fused to the other chain of the antibody. In some embodiments, the fusion protein is selected from anti-VEGF-BTLA-SIGLEC10 (e.g., SEQ ID NOs: 361, 363); anti-VEGF-BTLA-SIRPa (e.g., SEQ ID NOs: 361, 364); anti-VEGF-BTLA-PD1 (e.g., SEQ ID NOs: 361, 362); anti-VEGF-BTLA-TIM3 (e.g., SEQ ID NOs: 361, 365).

[0463] In other embodiments, the fusion protein comprises BTLA ECD and VEGFR ECD. In one embodiment, this fusion protein is BTLA-Fc-VEGFR (e.g., SEQ ID NO: 534). In another embodiment, this fusion protein is VEGFR-Fc-BTLA (e.g., SEQ ID NO: 565).

[0464] In some embodiments, the fusion protein comprises an antibody that binds IL-17 or IL-17R and BTLA ECD. In some embodiments, this fusion protein is selected from the following: anti-IL17-BTLA, anti-IL17R-BTLA (e.g., SEQ ID NOs: 325, 63).

[0465] In a further embodiment, the fusion protein comprises an antibody that binds IL-17 or IL-17R, BTLA ECD, and an additional receptor ECD. In one embodiment, BTLA ECD is fused to the heavy chain of the antibody and the additional receptor ECD is fused to the light chain of the antibody. Alternatively, BTLA ECD is fused to light chain and additional receptor ECD is fused to heavy chain. In some embodiments, the additional receptor ECD is the ECD of a T cell co-inhibitory molecule. In one embodiment, the T cell co-inhibitory molecule is PD-1. In some embodiments, the fusion protein is selected from: anti-IL17R-BTLA-PD1 (e.g., SEQ ID NOs: 325, 326). In another embodiment, the T cell co-inhibitory molecule is TIM3. In some embodiments, the fusion protein is selected from: anti-IL17R-BTLA-TIM3 (e.g., SEQ ID NOs: 325, 329). In another aspect, the additional receptor ECD is SIRPa ECD. In some embodiments, the fusion protein is selected from: anti-IL17R-BTLA-SIRPa (e.g., SEQ ID NOs: 325, 328). In another aspect, the additional receptor ECD is SIGLEC10 ECD. In some embodiments, the fusion protein is selected from: anti-IL17R-BTLA-SIGLEC10 (e.g., SEQ ID NOs: 325, 327). In another aspect, the additional receptor ECD is VEGFR ECD. In some embodiments, the fusion protein is selected from: anti-IL6R-VEGFR-BTLA (e.g., SEQ ID NOs: 324, 319).

[0466] In some embodiments, the fusion protein comprises an antibody that binds IL-23 or IL-23R and BTLA ECD. If the antibody binds IL-23, it is preferred that the antibody bind the p19 subunit of IL-23 that is not shared with IL-12. In some embodiments, this fusion protein is selected from the following: anti-IL23-BTLA (e.g., SEQ ID NOs: 337, 75), anti-IL23R-BTLA.

[0467] In a further embodiment, the fusion protein comprises an antibody that binds IL-23 or IL-23R, BTLA ECD, and an additional receptor ECD. In one embodiment, BTLA ECD is fused to the heavy chain of the antibody and the additional receptor ECD is fused to the light chain of the antibody. Alternatively, BTLA ECD is fused to light chain and additional receptor ECD is fused to heavy chain. In some embodiments, the additional receptor ECD is the ECD of a T cell co-inhibitory molecule. In one embodiment, the T cell co-inhibitory molecule is PD-1. In some embodiments, the fusion protein is selected from: anti-IL23-BTLA-PD1 (e.g., SEQ ID NOs: 337, 338). In another embodiment, the T cell co-inhibitory molecule is TIM3. In some embodiments, the fusion protein is selected from: anti-IL23-BTLA-TIM3 (e.g., SEQ ID NOs: 337, 341). In another aspect, the additional receptor ECD is SIRPa ECD. In some embodiments, the fusion protein is selected from: anti-IL23-BTLA-SIRPa (e.g., SEQ ID NOs: 337, 340). In another aspect, the additional receptor ECD is SIGLEC10 ECD. In some embodiments, the fusion protein is selected from: anti-IL23-BTLA-SIGLEC10 (e.g., SEQ ID NOs: 337, 339). In another aspect, the additional receptor ECD is VEGFR ECD. In some embodiments, the fusion protein is selected from: anti-IL23-VEGFR-BTLA (e.g., SEQ ID NOs: 348, 343).

[0468] In some embodiments, the fusion protein comprises an antibody that binds IL-6 or IL-6R and BTLA ECD. In some embodiments, this fusion protein is selected from the following: anti-IL6-BTLA, anti-IL6R-BTLA (e.g., SEQ ID NOs: 313, 79).

[0469] In a further embodiment, the fusion protein comprises an antibody that binds IL-6 or IL-6R, BTLA ECD, and an additional receptor ECD. In one embodiment, BTLA ECD is fused to the heavy chain of the antibody and the additional receptor ECD is fused to the light chain of the antibody. Alternatively, BTLA ECD is fused to light chain and additional receptor ECD is fused to heavy chain. In some embodiments, the additional receptor ECD is the ECD of a T cell co-inhibitory molecule. In one embodiment, the T cell co-inhibitory molecule is PD-1. In some embodiments, the fusion protein is selected from: anti-IL6R-BTLA-PD1 (e.g., SEQ ID NOs: 313, 314). In another embodiment, the T cell co-inhibitory molecule is TIM3. In some embodiments, the fusion protein is selected from: anti-IL6R-BTLA-TIM3 (e.g., SEQ ID NOs: 313, 317). In another aspect, the additional receptor ECD is SIRPa ECD. In some embodiments, the fusion protein is selected from: anti-IL6R-BTLA-SIRPa (e.g., SEQ ID NOs: 313, 316). In another aspect, the additional receptor ECD is SIGLEC10 ECD. In some embodiments, the fusion protein is selected from: anti-IL6R-BTLA-SIGLEC10 (e.g., SEQ ID NOs: 313, 315). In another aspect, the additional receptor ECD is VEGFR ECD. In some embodiments, the fusion protein is selected from: anti-IL6R-VEGFR-BTLA (e.g., SEQ ID NOs: 324, 319).

[0470] In some embodiments, the fusion protein comprises BTLA ECD and an antibody that binds TGFb, TGFbR, or GARP. Exemplary embodiments of this fusion protein include anti-TGFb-BTLA (e.g., SEQ ID NOs: 393, 133), anti-TGFbR-BTLA, and anti-GARP-BTLA (e.g., SEQ ID NOs: 410, 49).

[0471] In some embodiments, the fusion protein further comprises an additional receptor ECD. Exemplary embodiments of this fusion protein include anti-TGFb-BTLA-TIM3 (e.g., SEQ ID NOs: 393, 397); anti-TGFb-BTLA-PD1 (e.g., SEQ ID NOs: 393, 394); anti-TGFb-BTLA-SIRPa (e.g., SEQ ID NOs: 393, 396); anti-TGFb-BTLA-SIGLEC10 (e.g., SEQ ID NOs: 393, 395).

[0472] In some embodiments, the fusion protein comprises BTLA ECD and IL-15. In some embodiments, the fusion protein is IL15-Fc-BTLA (e.g., SEQ ID NO: 574) or BTLA-Fc-IL15 (e.g., SEQ ID NO: 573). In other embodiments, the fusion protein is IL12-Fc-BTLA (e.g., SEQ ID NO: 572) or BTLA-Fc-IL12 (e.g., SEQ ID NO: 571). In other embodiments, the fusion protein comprises an antibody with BTLA ECD fused to heavy chain and IL-15 fused to light chain. In other embodiments, the fusion protein comprises an antibody with BTLA ECD fused to heavy chain and IL-12 fused to light chain.

[0473] In various embodiments, the fusion proteins of the invention counteract CD47/SIRPa in the tumor microenvironment. In some embodiments, the fusion proteins comprise a ligand-binding sequence of an extracellular domain of SIRPa (e.g., SIRPa ECD).

[0474] In one embodiment, the fusion protein of the invention is an ALT that comprises an antibody that binds CD47 or CD47 ligand (e.g. SIRPa). In one example, the ALT comprises an antibody that binds CD47 and interferes with its interaction with SIRPa. In one example, the ALT comprises an antibody that binds SIRPa and interferes with its interaction with CD47. In one aspect, the antibody is an antagonist that inhibits SIRPa intracellular ITIM or ITSM signaling, thereby promoting immune cell activation. In various examples, the antibody that binds CD47 or SIRPa is fused to one or more ligand traps. In one example the CD47 or SIRPa antibody is fused to a ligand-binding sequence of the extracellular domain of PD1 (PD1 ECD). In one example the CD47 or SIRPa antibody is fused to a ligand-binding sequence of the extracellular domain of TGFbR (TGFbRII ECD). In one example the CD47 or SIRPa antibody is fused to a ligand-binding sequence of the extracellular domain of TIM3 (TIM3 ECD). In one example the CD47 or SIRPa antibody is fused to a ligand-binding sequence of the extracellular domain of BTLA (BTLA ECD). In one example the CD47 or SIRPa antibody is fused to a ligand-binding sequence of the extracellular domain of SIGLEC10 (SIGLEC10 ECD). In one example the CD47 or SIRPa antibody is fused to a ligand-binding sequence of the extracellular domain of VEGFR (VEGFR ECD). In one embodiment, the CD47 or SIRPa binding antibody is fused to multiple ligand traps selected from the following: PD1 ECD, TGFbRII ECD, TIM3 ECD, BTLA ECD, VEGFR ECD, SIGLEC10 ECD. In one aspect, a ligand trap (LT1) is fused to the heavy chain, and a second ligand trap (LT2) is fused to the light chain. In another aspect, LT1 or LT2 functions to localize the fusion protein to the tumor microenvironment. In one

[0475] In various examples, the ALT comprises a CD47 or SIRPa binding antibody, wherein the heavy chain is fused to TGFbRII ECD and the light chain is fused to PD1 ECD, BTLA ECD, TIM3 ECD, or SIGLEC10 ECD. In various examples, the ALT comprises a CD47 or SIRPa binding antibody, wherein the heavy chain is fused to VEGFR ECD and the light chain is fused to PD1 ECD, BTLA ECD, TIM3 ECD, or SIGLEC10 ECD. In various examples, the ALT comprises a CD47 or SIRPa binding antibody, wherein the heavy chain is fused to PD1 ECD and the light chain is fused to BTLA ECD, TIM3 ECD, or SIGLEC10 ECD. In various examples, the ALT comprises a CD47 or SIRPa binding antibody, wherein the heavy chain is fused to BTLA ECD and the light chain is fused to PD1 ECD, TIM3 ECD, or SIGLEC10 ECD. In various examples, the ALT comprises a CD47 or SIRPa binding antibody, wherein the heavy chain is fused to TIM3 ECD and the light chain is fused to BTLA ECD, PD1 ECD, or SIGLEC10 ECD. In various examples, the ALT comprises a CD47 or SIRPa binding antibody, wherein the heavy chain is fused to SIGLEC10 ECD and the light chain is fused to BTLA ECD, TIM3 ECD, or PD1 ECD.

[0476] In one embodiment, the fusion proteins of the invention may comprise a ligand-binding sequence of an extracellular domain of SIRPa to interrupt the interaction of SIRPa and CD47. In one embodiment, the fusion protein comprises a targeting polypeptide and the SIRPa ECD is fused to the targeting polypeptide. In some embodiments, the targeting polypeptide is an antibody and SIRPa ECD is fused to the heavy chain of the antibody. In other embodiments, the targeting polypeptide is an antibody and SIRPa ECD is fused to the light chain of the antibody.

[0477] In some embodiments, the fusion protein of the invention comprises a targeting polypeptide that is an antibody. In one embodiment, the antibody is fused to SIRPa ECD and additional ligand traps selected from the following: PD1 ECD, TGFbRII ECD, BTLA ECD, TIM3 ECD, VEGFR ECD, SIGLEC10 ECD. In one aspect, a ligand trap (LT1) is fused to the heavy chain, and a second ligand trap (LT2) is fused to the light chain. In one aspect, the SIRPa ECD is fused to the heavy chain and another ligand trap is fused to the light chain. In one aspect, the SIRPa ECD is fused to the light chain and another ligand trap is fused to the heavy chain. In various examples, the ALT comprises an antibody, wherein the heavy chain is fused to TIM3 ECD and the light chain is fused to one of PD1 ECD, BTLA ECD, SIRPa ECD, or SIGLEC10 ECD. In various examples, the ALT comprises an antibody wherein the light chain is fused to TIM3 ECD and the heavy chain is fused to one of PD1 ECD, TGFbRII ECD, BTLA ECD, TIM3 ECD, VEGFR ECD, SIGLEC10 ECD.

[0478] In some embodiments, the fusion protein comprises SIRPa ECD and a polypeptide that inhibits a T cell co-inhibitory molecule. In specific embodiments, the fusion protein comprises SIRPa ECD and an antibody that binds and disables a T cell co-inhibitory molecule.

[0479] In some embodiments, the fusion protein comprises SIRPa ECD and a polypeptide that inhibits the interaction of TIGIT or PVRIG with PVRL2 or PVR. In some embodiments, this fusion protein comprises an antibody that binds TIGIT or PVRIG fused to SIRPa ECD. Exemplary embodiments of this fusion protein include anti-TIGIT-SIRPa (e.g., SEQ ID NOs: 477, 139) and anti-PVRIG-SIRPa.

[0480] In some embodiments, the fusion protein comprises SIRPa ECD and a polypeptide that inhibits the interaction of VISTA and VSIG8. In some embodiments, this fusion protein comprises an antibody that binds VISTA or VSIG8 fused to SIRPa ECD. Exemplary embodiments of this fusion protein include anti-VISTA-SIRPa and anti-VSIG8-SIRPa.

[0481] In some embodiments, the fusion protein comprises SIRPa ECD and a polypeptide that inhibits the interaction of PD-1 and PD-L1. In some embodiments, this fusion protein comprises an antibody that binds PD-1 or PD-L1 fused to SIRPa ECD. Exemplary embodiments of this fusion protein include anti-PD1-SIRPa (e.g., SEQ ID NOs: 455, 101) and anti-PDL1-SIRPa (e.g., SEQ ID NOs: 465, 109).

[0482] In some embodiments, the fusion protein comprises SIRPa ECD and a polypeptide that inhibits CTLA-4. In some embodiments, this fusion protein comprises an antibody that binds CTLA-4 fused to SIRPa ECD. Exemplary embodiments of this fusion protein include anti-CTLA4-SIRPa (e.g., SEQ ID NOs: 443, 28).

[0483] In some embodiments, the fusion protein comprises SIRPa ECD and a polypeptide that inhibits TIM-3. In some embodiments, this fusion protein comprises an antibody that binds TIM-3 fused to SIRPa ECD. Exemplary embodiments of this fusion protein include anti-TIM3-SIRPa (e.g., SEQ ID NOs: 489, 141).

[0484] In some embodiments, the fusion protein comprises SIRPa ECD, an antibody that binds and disables a T cell co-inhibitory molecule, and an additional receptor ECD. In one aspect, the SIRPa ECD is fused to the heavy chain of the antibody and the additional receptor ECD is fused to the light chain of the antibody. Alternatively, the SIRPa ECD is fused to the light chain and the additional receptor ECD is fused to the heavy chain

[0485] In other embodiments, the fusion protein comprises SIRPa ECD, an antibody that binds and disables a T cell co-inhibitory molecule, and SIGLEC10 ECD. Exemplary embodiments of this fusion protein include anti-TIGIT-SIRPa-SIGLEC10 (e.g., SEQ ID NOs: 477, 471); anti-PD1-SIRPa-SIGLEC10 (e.g., SEQ ID NOs: 455, 449); anti-PDL1-SIRPa-SIGLEC10 (e.g., SEQ ID NOs: 465, 460); anti-TIM3-SIRPa-SIGLEC10 (e.g., SEQ ID NOs: 489, 483); anti-CTLA4-SIRPa-SIGLEC10 (e.g., SEQ ID NOs: 443, 437).

[0486] In some embodiments, the fusion protein comprises an antibody that binds a T cell co-stimulatory molecule fused to SIRPa. This antibody is preferably an agonist of the T cell co-stimulatory molecule. In some embodiments, this fusion protein is selected from: anti-ICOS-SIRPa (e.g., SEQ ID NOs: 525, 59); anti-OX40-SIRPa (e.g., SEQ ID NOs: 513, 97); anti-41BB-SIRPa (e.g., SEQ ID NOs: 501, 2).

[0487] In a further aspect, the fusion protein comprises an antibody that binds a T cell-costimulatory molecule, SIRPa ECD, and an additional receptor ECD. In one aspect, the SIRPa ECD is fused to the heavy chain of the antibody and the additional receptor ECD is fused to the light chain of the antibody. Alternatively, the SIRPa ECD is fused to the light chain of the antibody and the additional receptor ECD is fused to the heavy chain of the antibody. In some embodiments, the additional receptor ECD is the ECD of a T cell co-inhibitory molecule. In another aspect, the additional receptor ECD is SIGLEC10 ECD. In some embodiments, the fusion protein is selected from: anti-41BB—SIRPa-SIGLEC10 (e.g., SEQ ID NOs: 501, 495); anti-ICOS-SIRPa-SIGLEC10 (e.g., SEQ ID NOs: 525, 519); anti-OX40-SIRPa-SIGLEC10 (e.g., SEQ ID NOs: 513, 507).

[0488] In some embodiments, the fusion protein comprises an antibody, SIRPa ECD, and the ECD of a T cell co-stimulatory molecule. In one aspect, the SIRPa ECD is fused to heavy chain and the ECD of a T cell co-stimulatory molecule fused to light chain. Alternatively, the SIRPa ECD is fused to the light chain and the T cell co-stimulatory molecule ECD is fused to the heavy chain. In some embodiments, the fusion protein comprises SIRPa ECD and one of the following: OX40L, 41BBL, ICOSL.

[0489] In one embodiment, the fusion protein comprises SIRPa ECD and a polypeptide that binds an ectonucleotidase. In a preferred embodiment, the ectonucleotidase is either CD39 or CD73. In some embodiments, the fusion protein is an antibody that binds CD39 or CD73 fused to SIRPa ECD; for example: anti-CD39-SIRPa (e.g., SEQ ID NOs: 431, 18) or anti-CD73-SIRPa (e.g., SEQ ID NOs: 424, 24).

[0490] In some embodiments, the fusion protein comprises SIRPa ECD, an antibody that binds CD39 or CD73, and an additional receptor ECD. In some embodiments, the SIRPa ECD is fused to the heavy chain of the antibody and the additional receptor ECD is fused to the light chain of the antibody. Alternatively, the SIRPa ECD is fused to the light chain of the antibody and the additional receptor ECD is fused to the heavy chain of the antibody.

[0491] In some embodiments, the fusion protein comprises a tumor-targeted antibody and SIRPa ECD. In some embodiments, this tumor targeted-antibody binds a tumor growth factor or growth factor receptor. In other embodiments, this tumor targeted antibody binds a tumor cell surface molecule. In some embodiments, this fusion protein is selected from the following: anti-EGFR-SIRPa (e.g., SEQ ID NOs: 228, 43), anti-HER2-SIRPa (e.g., SEQ ID NOs: 252, 55), anti-EGFRvIII-SIRPa (e.g., SEQ ID NOs: 240, 47), anti-uPAR-SIRPa (e.g., SEQ ID NOs: 271, 162), anti-PSMA-SIRPa (e.g., SEQ ID NOs: 278, 121), anti-nectin-4-SIRPa.

[0492] In a further embodiment, the fusion protein comprises a tumor-targeted antibody, SIRPa ECD, and an additional receptor ECD. In one embodiment, the SIRPa ECD is fused to the heavy chain of the antibody and the additional receptor ECD is fused to the light chain of the antibody. Alternatively, the SIRPa ECD is fused to the light chain and the additional receptor ECD is fused to the heavy chain. In some embodiments, the additional receptor ECD is the ECD of a T cell co-inhibitory molecule. In another embodiment, the additional receptor ECD is SIGLEC10 ECD. In some embodiments, the fusion protein is selected from: anti-HER2-SIRPa-SIGLEC10 (e.g., SEQ ID NOs: 252, 246); anti-nectin4-SIRPa-SIGLEC10 (e.g., SEQ ID NOs: 264, 258); anti-EGFR—SIRPa-SIGLEC10 (e.g., SEQ ID NOs: 228, 222); anti-EGFRvIII—SIRPa-SIGLEC10 (e.g., SEQ ID NOs: 240, 234).

[0493] In some embodiments, the fusion protein comprises SIRPa ECD and a polypeptide that inhibits VEGF/VEGFR signaling.

[0494] In some embodiments, the fusion protein comprises SIRPa ECD and anti-VEGFR mAb with SIRPa ECD fused to either the heavy chain or light chain of the antibody. In some embodiments, this fusion protein is anti-VEGFR-SIRPa (e.g., SEQ ID NOs: 380, 148). In a further embodiment, the fusion protein may additionally comprise a receptor ECD fused to the other chain of the antibody. In some embodiments, the fusion protein is selected from anti-VEGFR-SIRPa-PD1 (e.g., SEQ ID NOs: 380, 373); anti-VEGFR-SIRPa-TIM3 (e.g., SEQ ID NOs: 380, 376); anti-VEGFR-SIRPa-BTLA (e.g., SEQ ID NOs: 380, 378); anti-VEGFR-SIRPa-SIGLEC10 (e.g., SEQ ID NOs: 380, 374).

[0495] In some embodiments, the fusion protein comprises SIRPa ECD and anti-VEGF mAb with SIRPa ECD fused to either the heavy chain or light chain of the antibody. In some embodiments, this fusion protein is anti-VEGF-SIRPa (e.g., SEQ ID NOs: 369, 32). In a further embodiment, the fusion protein may additionally comprise a receptor ECD fused to the other chain of the antibody. In some embodiments, the fusion protein is selected from anti-VEGF-SIRPa-BTLA (e.g., SEQ ID NOs: 369, 367); anti-VEGF-SIRPa-SIGLEC10 (e.g., SEQ ID NOs: 369, 363); anti-VEGF-SIRPa-TIM3 (e.g., SEQ ID NOs: 369, 365); anti-VEGF-SIRPa-PD1 (e.g., SEQ ID NOs: 369, 362)

[0496] In some embodiments, the fusion protein comprises an antibody that binds IL-17 or IL-17R and SIRPa ECD. In some embodiments, this fusion protein is selected from the following: anti-IL17-SIRPa, anti-IL17R-SIRPa (e.g., SEQ ID NOs: 333, 63).

[0497] In a further embodiment, the fusion protein comprises an antibody that binds IL-17 or IL-17R, SIRPa ECD, and an additional receptor ECD. In one embodiment, SIRPa ECD is fused to the heavy chain of the antibody and the additional receptor ECD is fused to the light chain of the antibody. Alternatively, SIRPa ECD is fused to light chain and additional receptor ECD is fused to heavy chain. In some embodiments, the additional receptor ECD is the ECD of a T cell co-inhibitory molecule. In another aspect, the additional receptor ECD is SIGLEC10 ECD. In some embodiments, the fusion protein is selected from: anti-IL17R-SIRPa-SIGLEC10 (e.g., SEQ ID NOs: 333, 327).

[0498] In some embodiments, the fusion protein comprises an antibody that binds IL-23 or IL-23R and SIRPa ECD. If the antibody binds IL-23, it is preferred that the antibody bind the p19 subunit of IL-23 that is not shared with IL-12. In some embodiments, this fusion protein is selected from the following: anti-IL23-SIRPa (e.g., SEQ ID NOs: 345, 75), anti-IL23R-SIRPa.

[0499] In a further embodiment, the fusion protein comprises an antibody that binds IL-23 or IL-23R, SIRPa ECD, and an additional receptor ECD. In one embodiment, SIRPa ECD is fused to the heavy chain of the antibody and the additional receptor ECD is fused to the light chain of the antibody. Alternatively, SIRPa ECD is fused to light chain and additional receptor ECD is fused to heavy chain. In some embodiments, the additional receptor ECD is the ECD of a T cell co-inhibitory molecule. In another aspect, the additional receptor ECD is SIGLEC10 ECD. In some embodiments, the fusion protein is selected from: anti-IL23-SIRPa-SIGLEC10 (e.g., SEQ ID NOs: 345, 339).

[0500] In some embodiments, the fusion protein comprises an antibody that binds IL-6 or IL-6R and SIRPa ECD. In some embodiments, this fusion protein is selected from the following: anti-IL6-SIRPa, anti-IL6R-SIRPa (e.g., SEQ ID NOs: 321, 79).

[0501] In some embodiments, the fusion protein comprises an antibody that binds IL-6 or IL-6R, SIRPa ECD, and an additional receptor ECD. In one embodiment, SIRPa ECD is fused to the heavy chain of the antibody and the additional receptor ECD is fused to the light chain of the antibody. Alternatively, SIRPa ECD is fused to light chain and additional receptor ECD is fused to heavy chain. In some embodiments, the additional receptor ECD is the ECD of a T cell co-inhibitory molecule. In another aspect, the additional receptor ECD is SIGLEC10 ECD. In some embodiments, the fusion protein is selected from: anti-IL6R-SIRPa-SIGLEC10 (e.g., SEQ ID NOs: 321, 315).

[0502] In some embodiments, the fusion protein comprises SIRPa ECD and an antibody that binds TGFb, TGFbR, or GARP. Exemplary embodiments of this fusion protein include anti-TGFb-SIRPa (e.g., SEQ ID NOs: 401, 133), anti-TGFbR-SIRPa, and anti-GARP-SIRPa (e.g., SEQ ID NOs: 413, 49).

[0503] In some embodiments, the fusion protein further comprises an additional receptor ECD. Exemplary embodiments of this fusion protein include anti-TGFb-SIRPa-BTLA (e.g., SEQ ID NOs: 401, 399); anti-TGFb-SIRPa-TIM3 (e.g., SEQ ID NOs: 401, 397); anti-TGFb-SIRPa-PD1 (e.g., SEQ ID NOs: 401, 394); anti-TGFb-SIRPa-SIGLEC10 (e.g., SEQ ID NOs: 401, 395).

[0504] In some embodiments, the fusion protein comprises SIRPa ECD and IL-15. In some embodiments, the fusion protein is IL15-Fc-SIRPa (e.g., SEQ ID NO: 586) or SIRPa-Fc-IL15 (e.g., SEQ ID NO: 585). In other embodiments, the fusion protein is IL12-Fc-SIRPa (e.g., SEQ ID NO: 584) or SIRPa-Fc-IL12 (e.g., SEQ ID NO: 583). In other embodiments, the fusion protein comprises an antibody with SIRPa ECD fused to heavy chain and IL-15 fused to light chain. In other embodiments, the fusion protein comprises an antibody with SIRPa ECD fused to heavy chain and IL-12 fused to light chain.

[0505] In various embodiments, the fusion proteins of the invention counteract SIGLEC10/CD24 in the tumor microenvironment. In some embodiments, the fusion proteins comprise a ligand-binding sequence of an extracellular domain of SIGLEC10 (e.g., SIGLEC10 ECD).

[0506] In one embodiment, the fusion protein of the invention is an ALT that comprises an antibody that binds SIGLEC10 or CD24. In one example, the ALT comprises an antibody that binds CD24 and interferes with its interaction with SIGLEC10. In one example, the ALT comprises an antibody that binds SIGLEC10 and interferes with its interaction with CD24. In one aspect, the antibody is an antagonist that inhibits SIGLEC10 intracellular ITIM or ITSM signaling, thereby promoting immune cell activation. In various examples, the antibody that binds CD24 or SIGLEC10 is fused to one or more ligand traps. In one example the CD24 or SIGLEC10 antibody is fused to a ligand-binding sequence of the extracellular domain of PD1 (PD1 ECD). In one example the CD24 or SIGLEC10 antibody is fused to a ligand-binding sequence of the extracellular domain of TGFbR (TGFbRII ECD). In one example the CD24 or SIGLEC10 antibody is fused to a ligand-binding sequence of the extracellular domain of TIM3 (TIM3 ECD). In one example the CD24 or SIGLEC10 antibody is fused to a ligand-binding sequence of the extracellular domain of BTLA (BTLA ECD). In one example the CD24 or SIGLEC10 antibody is fused to a ligand-binding sequence of the extracellular domain of SIRPa (SIRPa ECD). In one example the CD24 or SIGLEC10 antibody is fused to a ligand-binding sequence of the extracellular domain of VEGFR (VEGFR ECD). In one embodiment, the CD24 or SIGLEC10 binding antibody is fused to multiple ligand traps selected from the following: PD1 ECD, TGFbRII ECD, TIM3 ECD, BTLA ECD, VEGFR ECD, SIRPa ECD. In one aspect, a ligand trap (LT1) is fused to the heavy chain, and a second ligand trap (LT2) is fused to the light chain.

[0507] In various examples, the ALT comprises a CD24 or SIGLEC10 binding antibody, wherein the heavy chain is fused to TGFbRII ECD and the light chain is fused to PD1 ECD, BTLA ECD, TIM3 ECD, or SIRPa ECD. In various examples, the ALT comprises a CD24 or SIGLEC10 binding antibody, wherein the heavy chain is fused to VEGFR ECD and the light chain is fused to PD1 ECD, BTLA ECD, TIM3 ECD, or SIRPa ECD. In various examples, the ALT comprises a CD24 or SIGLEC10 binding antibody, wherein the heavy chain is fused to PD1 ECD and the light chain is fused to BTLA ECD, TIM3 ECD, or SIRPa ECD. In various examples, the ALT comprises a CD24 or SIGLEC10 binding antibody, wherein the heavy chain is fused to BTLA ECD and the light chain is fused to PD1 ECD, TIM3 ECD, or SIRPa ECD. In various examples, the ALT comprises a CD24 or SIGLEC10 binding antibody, wherein the heavy chain is fused to TIM3 ECD and the light chain is fused to BTLA ECD, PD1 ECD, or SIRPa ECD. In various examples, the ALT comprises a CD24 or SIGLEC10 binding antibody, wherein the heavy chain is fused to SIRPa ECD and the light chain is fused to BTLA ECD, TIM3 ECD, or PD1 ECD.

[0508] In one embodiment, the fusion proteins of the invention may comprise a ligand-binding sequence of an extracellular domain of SIGLEC10 to interrupt the interaction of SIGLEC10 and CD24. In one embodiment, the fusion protein comprises a targeting polypeptide and the SIGLEC10 ECD is fused to the targeting polypeptide. In some embodiments, the targeting polypeptide is an antibody and SIGLEC10 ECD is fused to the heavy chain of the antibody. In other embodiments, the targeting polypeptide is an antibody and SIGLEC10 ECD is fused to the light chain of the antibody.

[0509] In some embodiments, the fusion protein of the invention comprises a targeting polypeptide that is an antibody. In one embodiment, the antibody is fused to SIGLEC10 ECD and additional ligand traps selected from the following: PD1 ECD, TGFbRII ECD, BTLA ECD, TIM3 ECD, VEGFR ECD, SIRPa ECD. In one aspect, a ligand trap (LT1) is fused to the heavy chain, and a second ligand trap (LT2) is fused to the light chain. In one aspect, the SIGLEC10 ECD is fused to the heavy chain and another ligand trap is fused to the light chain. In one aspect, the SIGLEC10 ECD is fused to the light chain and another ligand trap is fused to the heavy chain. In various examples, the ALT comprises an antibody, wherein the heavy chain is fused to TIM3 ECD and the light chain is fused to one of PD1 ECD, BTLA ECD, SIGLEC10 ECD, or SIRPa ECD. In various examples, the ALT comprises an antibody wherein the light chain is fused to TIM3 ECD and the heavy chain is fused to one of PD1 ECD, TGFbRII ECD, BTLA ECD, TIM3 ECD, VEGFR ECD, SIRPa ECD.

[0510] In some embodiments, the fusion protein comprises SIGLEC10 ECD and a polypeptide that inhibits the interaction between CD47 and SIRPa. In one embodiment, this fusion protein comprises SIGLEC10 ECD and a polypeptide that binds CD47. In one embodiment, this fusion protein is anti-CD47 mAb fused to SIGLEC10 ECD (anti-CD47-SIGLEC10 (e.g., SEQ ID NOs: 389, 22)). In another embodiment, this fusion protein comprises SIRPa ECD and SIGLEC10 ECD. In one embodiment, this fusion protein is SIRPa-Fc-SIGLEC10 (e.g., SEQ ID NO: 549) or SIGLEC10-Fc-SIRPa (e.g., SEQ ID NO: 543).

[0511] In a further aspect, the fusion protein comprises SIGLEC10 ECD, a polypeptide that inhibits the interaction between CD47 and SIRPa, and another polypeptide that inhibits a T cell co-inhibitory molecule. In some embodiments, this fusion protein comprises anti-CD47 mAb with SIGLEC10 ECD fused to the heavy chain or light chain; and a T cell co-inhibitory molecule ECD fused to the other chain. In a particular embodiment, this fusion protein is anti-CD47-SIGLEC10-PD1 (e.g., SEQ ID NOs: 389, 384). In another embodiment, this fusion protein is anti-CD47-SIGLEC10-TIM3 (e.g., SEQ ID NOs: 389, 386).

[0512] In another aspect, the fusion protein comprises SIGLEC10 ECD, anti-CD47 mAb, and VEGFR ECD. In some embodiments, VEGFR ECD is fused to heavy chain of anti-CD47 mAb and SIGLEC10 ECD is fused to light chain of anti-CD47 mAb. In one embodiment, this fusion protein is anti-CD47-VEGFR-SIGLEC10 (e.g., SEQ ID NOs: 392, 385).

[0513] In another aspect, the fusion protein comprises SIGLEC10 ECD, SIRPa ECD, and an antibody with a heavy chain and light chain. In one aspect, the SIGLEC10 ECD is fused to the heavy chain of the antibody and the SIRPa ECD is fused to the light chain of the antibody. In another aspect, the SIGLEC10 ECD is fused to the light chain of the antibody and the SIRPa ECD is fused to the heavy chain of the antibody. In some embodiments, the antibody of said fusion protein binds a T cell co-inhibitory molecule as an antagonist. Exemplary embodiments of such fusion proteins include anti-CTLA4-SIGLEC10-SIRPa (e.g., SEQ ID NOs: 442, 438), anti-PD1-SIGLEC10-SIRPa (e.g., SEQ ID NOs: 454, 450), and anti-PDL1-SIGLEC10-SIRPa (e.g., SEQ ID NOs: 463, 461). In other embodiments, the antibody of said fusion protein binds a T cell co-stimulatory molecule as an agonist. Exemplary embodiments of this fusion protein include anti-OX40-SIGLEC10-SIRPa (e.g., SEQ ID NOs: 512, 508), anti-41BB-SIGLEC10-SIRPa (e.g., SEQ ID NOs: 500, 496), and anti-CD40-SIGLEC10-SIRPa. In other embodiments, the antibody of said fusion protein is a tumor-targeted antibody. In some embodiments, this tumor targeted-antibody binds a tumor growth factor or growth factor receptor. In other embodiments, this tumor targeted antibody binds a tumor cell surface molecule. Exemplary embodiments of this fusion protein include anti-EGFR-SIGLEC10-SIRPa (e.g., SEQ ID NOs: 227, 223), anti-HER2-SIGLEC10-SIRPa (e.g., SEQ ID NOs: 251, 247), anti-EGFRvIII-SIGLEC10-SIRPa (e.g., SEQ ID NOs: 239, 235), anti-uPAR-SIGLEC10-SIRPa, and anti-PSMA-SIGLEC10-SIRPa.

[0514] In other embodiments, the antibody of said fusion protein binds a member of the TGFb pathway. In some embodiments, this antibody binds TGFb, TGFbR, or GARP. Exemplary embodiments of this fusion protein include anti-TGFb-SIGLEC10-SIRPa (e.g., SEQ ID NOs: 400, 396), anti-TGFbR-SIGLEC10-SIRPa, and anti-GARP-SIGLEC10-SIRPa.

[0515] In other embodiments, the antibody of said fusion protein binds VEGF or VEGFR. Exemplary embodiments of this fusion protein include anti-VEGF-SIGLEC10-SIRPa (e.g., SEQ ID NOs: 368, 364) and anti-VEGFR-SIGLEC10-SIRPa (e.g., SEQ ID NOs: 379, 375).

[0516] In some embodiments, the fusion protein comprises SIGLEC10 ECD and a polypeptide that inhibits a T cell co-inhibitory molecule. In specific embodiments, the fusion protein comprises SIGLEC10 ECD and an antibody that binds and disables a T cell co-inhibitory molecule.

[0517] In some embodiments, the fusion protein comprises SIGLEC10 ECD and a polypeptide that inhibits the interaction of TIGIT or PVRIG with PVRL2 or PVR. In some embodiments, this fusion protein comprises an antibody that binds TIGIT or PVRIG fused to SIGLEC10 ECD. Exemplary embodiments of this fusion protein include anti-TIGIT-SIGLEC10 (e.g., SEQ ID NOs: 476, 139) and anti-PVRIG-SIGLEC10.

[0518] In some embodiments, the fusion protein comprises SIGLEC10 ECD and a polypeptide that inhibits the interaction of VISTA and VSIG8. In some embodiments, this fusion protein comprises an antibody that binds VISTA or VSIG8 fused to SIGLEC10 ECD. Exemplary embodiments of this fusion protein include anti-VISTA-SIGLEC10 and anti-VSIG8-SIGLEC10.

[0519] In some embodiments, the fusion protein comprises SIGLEC10 ECD and a polypeptide that inhibits the interaction of PD-1 and PD-L1. In some embodiments, this fusion protein comprises an antibody that binds PD-1 or PD-L1 fused to SIGLEC10 ECD. Exemplary embodiments of this fusion protein include anti-PD1-SIGLEC10 (e.g., SEQ ID NOs: 454, 101) and anti-PDL1-SIGLEC10 (e.g., SEQ ID NOs: 463, 109).

[0520] In some embodiments, the fusion protein comprises SIGLEC10 ECD and a polypeptide that inhibits CTLA-4. In some embodiments, this fusion protein comprises an antibody that binds CTLA-4 fused to SIGLEC10 ECD. Exemplary embodiments of this fusion protein include anti-CTLA4-SIGLEC10 (e.g., SEQ ID NOs: 442, 28).

[0521] In some embodiments, the fusion protein comprises SIGLEC10 ECD and a polypeptide that inhibits TIM-3. In some embodiments, this fusion protein comprises an antibody that binds TIM-3 fused to SIGLEC10 ECD. Exemplary embodiments of this fusion protein include anti-TIM3-SIGLEC10 (e.g., SEQ ID NOs: 488, 141).

[0522] In some embodiments, the fusion protein comprises SIGLEC10 ECD, an antibody that binds and disables a T cell co-inhibitory molecule, and an additional receptor ECD. In one aspect, the SIGLEC10 ECD is fused to the heavy chain of the antibody and the additional receptor ECD is fused to the light chain of the antibody. Alternatively, the SIGLEC10 ECD is fused to the light chain and the additional receptor ECD is fused to the heavy chain.

[0523] Fusion proteins comprising SIGLEC10 ECD and antibody that binds a T cell co-stimulatory molecule as an agonist

[0524] In some embodiments, the fusion protein comprises an antibody that binds a T cell co-stimulatory molecule fused to SIGLEC10. This antibody is preferably an agonist of the T cell co-stimulatory molecule. In some embodiments, this fusion protein is selected from: anti-41BB-SIGLEC10 (e.g., SEQ ID NOs: 500, 2); anti-OX40-SIGLEC10 (e.g., SEQ ID NOs: 512, 97); anti-ICOS-SIGLEC10 (e.g., SEQ ID NOs: 524, 59).

[0525] In a further aspect, the fusion protein comprises an antibody that binds a T cell-costimulatory molecule, SIGLEC10 ECD, and an additional receptor ECD. In one aspect, the SIGLEC10 ECD is fused to the heavy chain of the antibody and the additional receptor ECD is fused to the light chain of the antibody. Alternatively, the SIGLEC10 ECD is fused to the light chain of the antibody and the additional receptor ECD is fused to the heavy chain of the antibody. In some embodiments, the additional receptor ECD is the ECD of a T cell co-inhibitory molecule.

[0526] In some embodiments, the fusion protein comprises an antibody, SIGLEC10 ECD, and the ECD of a T cell co-stimulatory molecule. In one aspect, the SIGLEC10 ECD is fused to heavy chain and the ECD of a T cell co-stimulatory molecule fused to light chain. Alternatively, the SIGLEC10 ECD is fused to the light chain and the T cell co-stimulatory molecule ECD is fused to the heavy chain. In some embodiments, the fusion protein comprises SIGLEC10 ECD and one of the following: OX40L, 41BBL, ICOSL.

[0527] In one embodiment, the fusion protein comprises SIGLEC10 ECD and a polypeptide that binds an ectonucleotidase. In a preferred embodiment, the ectonucleotidase is either CD39 or CD73. In some embodiments, the fusion protein is an antibody that binds CD39 or CD73 fused to SIGLEC10 ECD; for example: anti-CD39-SIGLEC10 (e.g., SEQ ID NOs: 430, 18) or anti-CD73-SIGLEC10 (e.g., SEQ ID NOs: 423, 24).

[0528] In some embodiments, the fusion protein comprises SIGLEC10 ECD, an antibody that binds CD39 or CD73, and an additional receptor ECD. In some embodiments, the SIGLEC10 ECD is fused to the heavy chain of the antibody and the additional receptor ECD is fused to the light chain of the antibody. Alternatively, the SIGLEC10 ECD is fused to the light chain of the antibody and the additional receptor ECD is fused to the heavy chain of the antibody.

[0529] In some embodiments, the fusion protein comprises a tumor-targeted antibody and SIGLEC10 ECD. In some embodiments, this tumor targeted-antibody binds a tumor growth factor or growth factor receptor. In other embodiments, this tumor targeted antibody binds a tumor cell surface molecule. In some embodiments, this fusion protein is selected from the following: anti-EGFR-SIGLEC10 (e.g., SEQ ID NOs: 227, 43), anti-HER2-SIGLEC10 (e.g., SEQ ID NOs: 251, 55), anti-EGFRvIII-SIGLEC10 (e.g., SEQ ID NOs: 239, 47), anti-uPAR-SIGLEC10 (e.g., SEQ ID NOs: 270, 162), anti-PSMA-SIGLEC10 (e.g., SEQ ID NOs: 277, 121), anti-nectin-4-SIGLEC10.

[0530] In a further embodiment, the fusion protein comprises a tumor-targeted antibody, SIGLEC10 ECD, and an additional receptor ECD. In one embodiment, the SIGLEC10 ECD is fused to the heavy chain of the antibody and the additional receptor ECD is fused to the light chain of the antibody. Alternatively, the SIGLEC10 ECD is fused to the light chain and the additional receptor ECD is fused to the heavy chain.

[0531] In some embodiments, the fusion protein comprises SIGLEC10 ECD and a polypeptide that inhibits VEGF/VEGFR signaling.

[0532] In some embodiments, the fusion protein comprises SIGLEC10 ECD and anti-VEGFR mAb with SIGLEC10 ECD fused to either the heavy chain or light chain of the antibody. In some embodiments, this fusion protein is anti-VEGFR-SIGLEC10 (e.g., SEQ ID NOs: 379, 148). In a further embodiment, the fusion protein may additionally comprise a receptor ECD fused to the other chain of the antibody.

[0533] In some embodiments, the fusion protein comprises SIGLEC10 ECD and anti-VEGF mAb with SIGLEC10 ECD fused to either the heavy chain or light chain of the antibody. In some embodiments, this fusion protein is anti-VEGF-SIGLEC10 (e.g., SEQ ID NOs: 368, 32). In a further embodiment, the fusion protein may additionally comprise a receptor ECD fused to the other chain of the antibody.

[0534] In other embodiments, the fusion protein comprises SIGLEC10 ECD and VEGFR ECD. In one embodiment, this fusion protein is SIGLEC10-Fc-VEGFR (e.g., SEQ ID NO: 546). In another embodiment, this fusion protein is VEGFR-Fc-SIGLEC10 (e.g., SEQ ID NO: 567).

[0535] In some embodiments, the fusion protein comprises an antibody that binds IL-17 or IL-17R and SIGLEC10 ECD. In some embodiments, this fusion protein is selected from the following: anti-IL17-SIGLEC10, anti-IL17R-SIGLEC10 (e.g., SEQ ID NOs: 332, 63).

[0536] In a further embodiment, the fusion protein comprises an antibody that binds IL-17 or IL-17R, SIGLEC10 ECD, and an additional receptor ECD. In one embodiment, SIGLEC10 ECD is fused to the heavy chain of the antibody and the additional receptor ECD is fused to the light chain of the antibody. Alternatively, SIGLEC10 ECD is fused to light chain and additional receptor ECD is fused to heavy chain. In some embodiments, the additional receptor ECD is the ECD of a T cell co-inhibitory molecule.

[0537] In some embodiments, the fusion protein comprises an antibody that binds IL-23 or IL-23R and SIGLEC10 ECD. If the antibody binds IL-23, it is preferred that the antibody bind the p19 subunit of IL-23 that is not shared with IL-12. In some embodiments, this fusion protein is selected from the following: anti-IL23-SIGLEC10 (e.g., SEQ ID NOs: 344, 75), anti-IL23R-SIGLEC10.

[0538] In a further embodiment, the fusion protein comprises an antibody that binds IL-23 or IL-23R, SIGLEC10 ECD, and an additional receptor ECD. In one embodiment, SIGLEC10 ECD is fused to the heavy chain of the antibody and the additional receptor ECD is fused to the light chain of the antibody. Alternatively, SIGLEC10 ECD is fused to light chain and additional receptor ECD is fused to heavy chain. In some embodiments, the additional receptor ECD is the ECD of a T cell co-inhibitory molecule.

[0539] In some embodiments, the fusion protein comprises an antibody that binds IL-6 or IL-6R and SIGLEC10 ECD. In some embodiments, this fusion protein is selected from the following: anti-IL6-SIGLEC10, anti-IL6R-SIGLEC10 (e.g., SEQ ID NOs: 320, 79).

[0540] In a further embodiment, the fusion protein comprises an antibody that binds IL-6 or IL-6R, SIGLEC10 ECD, and an additional receptor ECD. In one embodiment, SIGLEC10 ECD is fused to the heavy chain of the antibody and the additional receptor ECD is fused to the light chain of the antibody. Alternatively, SIGLEC10 ECD is fused to light chain and additional receptor ECD is fused to heavy chain. In some embodiments, the additional receptor ECD is the ECD of a T cell co-inhibitory molecule.

[0541] In some embodiments, the fusion protein comprises SIGLEC10 ECD and an antibody that binds TGFb, TGFbR, or GARP. Exemplary embodiments of this fusion protein include anti-TGFb-SIGLEC10 (e.g., SEQ ID NOs: 400, 133), anti-TGFbR-SIGLEC10, and anti-GARP-SIGLEC10 (e.g., SEQ ID NOs: 412, 49). In some embodiments, the fusion protein further comprises an additional receptor ECD.

[0542] In some embodiments, the fusion protein comprises SIGLEC10 ECD and IL-15. In some embodiments, the fusion protein is IL15-Fc-SIGLEC10 (e.g., SEQ ID NO: 582) or SIGLEC10-Fc-IL15 (e.g., SEQ ID NO: 581). In other embodiments, the fusion protein is IL12-Fc-SIGLEC10 (e.g., SEQ ID NO: 580) or SIGLEC10-Fc-IL12 (e.g., SEQ ID NO: 579). In other embodiments, the fusion protein comprises an antibody with SIGLEC10 ECD fused to heavy chain and IL-15 fused to light chain. In other embodiments, the fusion protein comprises an antibody with SIGLEC10 ECD fused to heavy chain and IL-12 fused to light chain.

[0543] In some embodiments, this invention covers fusion proteins comprising two different extracellular domains (ECDs).

[0544] In some embodiments, ECD #1 is a ligand-binding fragment of PD1 ECD. In some embodiments, ECD #2 is a ligand-binding fragment of a T cell co-inhibitory molecule. In some embodiments, ECD #2 is BTLA ECD or TIM3 ECD. In other embodiments, ECD #2 is VEGFR ECD. In other embodiments, ECD #2 is TGFbRII ECD. In other embodiments, ECD #2 is a cytokine receptor ECD. In other embodiments, ECD #2 is the ECD of a receptor whose ligation inhibits phagocytosis. In some embodiments, ECD #2 is SIRPa ECD or SIGLEC10 ECD.

[0545] In some embodiments, ECD #1 is a ligand-binding fragment of BTLA ECD. In some embodiments, ECD #2 is a ligand-binding fragment of a T cell co-inhibitory molecule. In some embodiments, ECD #2 is TIM3 ECD. In other embodiments, ECD #2 is VEGFR ECD. In other embodiments, ECD #2 is TGFbRII ECD. In other embodiments, ECD #2 is a cytokine receptor ECD. In other embodiments, ECD #2 is the ECD of a receptor whose ligation inhibits phagocytosis. In some embodiments, ECD #2 is SIRPa ECD or SIGLEC10 ECD.

[0546] In some embodiments, ECD #1 is a ligand-binding fragment of TIM3 ECD. In some embodiments, ECD #2 is a ligand-binding fragment of a T cell co-inhibitory molecule. In other embodiments, ECD #2 is VEGFR ECD. In other embodiments, ECD #2 is TGFbRII ECD. In other embodiments, ECD #2 is a cytokine receptor ECD. In other embodiments, ECD #2 is the ECD of a receptor whose ligation inhibits phagocytosis. In some embodiments, ECD #2 is SIRPa ECD or SIGLEC10 ECD.

[0547] In some embodiments, ECD #1 is a ligand-binding fragment of TGFbRII ECD. In some embodiments, ECD #2 is a ligand-binding fragment of a T cell co-inhibitory molecule. In other embodiments, ECD #2 is VEGFR ECD. In other embodiments, ECD #2 is a cytokine receptor ECD. In other embodiments, ECD #2 is the ECD of a receptor whose ligation inhibits phagocytosis. In some embodiments, ECD #2 is SIRPa ECD or SIGLEC10 ECD. In other embodiments, ECD #2 is the ECD of a T cell co-stimulatory ligand. In some embodiments, ECD #2 is one of OX40L, 41BBL, ICOSL, GITRL, LIGHT, CD70, CD40L, CD30L.

[0548] In some embodiments, ECD #1 is a ligand-binding fragment of VEGFR ECD. In some embodiments, ECD #2 is a ligand-binding fragment of a T cell co-inhibitory molecule. In other embodiments, ECD #2 is a cytokine receptor ECD. In other embodiments, ECD #2 is the ECD of a receptor whose ligation inhibits phagocytosis. In some embodiments, ECD #2 is SIRPa ECD or SIGLEC10 ECD. In other embodiments, ECD #2 is the ECD of a T cell co-stimulatory ligand. In some embodiments, ECD #2 is one of OX40L, 41BBL, ICOSL, GITRL, LIGHT, CD70, CD40L, CD30L.

[0549] In some embodiments, ECD #1 is a ligand-binding fragment of SIRPa ECD. In some embodiments, ECD #2 is a ligand-binding fragment of a T cell co-inhibitory molecule. In other embodiments, ECD #2 is a cytokine receptor ECD. In other embodiments, ECD #2 is the ECD of a receptor whose ligation inhibits phagocytosis. In some embodiments, ECD #2 is SIGLEC 10 ECD.

[0550] In some embodiments, ECD #1 is a ligand-binding fragment of SIGLEC10 ECD. In some embodiments, ECD #2 is a ligand-binding fragment of a T cell co-inhibitory molecule.

[0551] In other embodiments, ECD #2 is a cytokine receptor ECD. In other embodiments, ECD #2 is the ECD of a receptor whose ligation inhibits phagocytosis. In other embodiments, ECD #2 is the ECD of a T cell co-stimulatory ligand. In some embodiments, ECD #2 is one of OX40L, 41BBL, ICOSL, GITRL, LIGHT, CD70, CD40L, CD30L.

[0552] In various embodiments, the invention provides preferred fusion proteins for treatment of cancer by counteracting key ligands/receptors that promote angiogenesis and immune dysfunction in the TME.

[0553] In one embodiment, the invention describes VEGF or VEGFR binding fusion proteins (ALT or ECD-ECD comprising a VEGF antibody, VEGFR antibody, or VEGFR ECD). In various embodiments, the ALT or ECD-ECD enables preferential localization of VEGF blockade to the TME.

[0554] In one embodiment, the VEGF/VEGFR blocking fusion protein of the invention comprises a tumor targeted antibody fused to VEGFR ECD. In various examples, without being limited to them, the ALT comprises an antibody that targets a tumor-associated cell surface antigen or molecule wherein the heavy chain is fused to VEGFR ECD (e.g. anti-HER2-VEGFR ECD; anti-EGFRvIII-VEGFR ECD; anti-PSMA-VEGFR ECD; anti-CEA-VEGFR ECD). In another aspect, the light chain of the ALT may be additionally fused to a receptor ECD that binds a ligand expressed on tumor cells or the TME. In various examples the additional receptor ECD fused to the light chain is PD1 ECD, TIM3 ECD, BTLA ECD, SIRPa ECD, or SIGLEC10 ECD.

[0555] In another aspect the ALT may be any antibody wherein the heavy chain is fused to VEGFR ECD, and the light chain is fused to another receptor ECD that binds a ligand expressed on tumor cells or the TME. In various examples the additional receptor ECD fused to the light chain is PD1 ECD, TIM3 ECD, BTLA ECD, SIRPa ECD, or SIGLEC10 ECD.

[0556] In another embodiment, the VEGF/VEGFR blocking ALT comprises a VEGF or VEGFR binding antibody fused to a receptor ECD that binds a ligand expressed on tumor cells or the TME. In various examples the ALT contains PD1 ECD (e.g. anti-VEGF-PD1 ECD to bind PDL1/2 on tumor cells), or BTLA ECD (anti-VEGF-BTLA ECD to bind HVEM on tumor cells), or TIM3 ECD (anti-VEGF-TIM3 ECD to bind CEACAM1/5 on tumor cells) or SIRPa ECD (anti-VEGF-SIRPa ECD to bind CD47 on tumor cells) or SIGLEC10 ECD (anti-VEGF-SIGLEC10 ECD). In another aspect, the VEGF-binding ECD-ECD may comprise a polypeptide containing VEGFR ECD and a receptor ECD that binds a ligand expressed on tumor cells or the TME (e.g. PD1 ECD, BTLA ECD, TIM3 ECD, SIRPa ECD, SIGLEC10 ECD).

[0557] In another embodiment, the VEGF/VEGFR binding fusion protein of the invention simultaneously binds CD47. In one aspect, the ALT comprises a CD47 binding antibody fused to VEGFR ECD. In another aspect the heavy chain is fused to VEGFR ECD, and the light chain is fused to another receptor ECD that binds a ligand expressed on tumor cells or the TME. In various examples the additional receptor ECD fused to the light chain is PD1 ECD, TIM3 ECD, BTLA ECD, SIRPa ECD, or SIGLEC10 ECD. In another aspect, the ALT comprises a VEGF binding antibody or VEGFR binding antibody fused to SIRPa ECD. In another aspect, the ECD-ECD comprises VEGFR ECD and SIRPa ECD (e.g. VEGFR ECD-Fc-SIRPa ECD; SIRPa ECD-Fc-VEGFR ECD).

[0558] In another embodiment, the VEGF/VEGFR binding fusion protein of the invention binds VEGF or VEGFR and disrupts a ligand/receptor that promotes TH17 cell differentiation/function or angiogenesis in the TME.

[0559] In another embodiment, the VEGF/VEGFR binding fusion protein of the invention binds VEGF and TGFb. In one aspect a TGFb binding antibody is fused to VEGFR ECD. In one aspect a GARP or LAP binding antibody is fused to VEGFR ECD. In another aspect, a VEGF or VEGFR binding antibody is fused to TGFbRII ECD. In another aspect, the light chain of the ALT may be additionally fused to a receptor ECD that binds a ligand expressed on tumor cells or the TME. In various examples the additional receptor ECD fused to the light chain is PD1 ECD, TIM3 ECD, BTLA ECD, SIRPa ECD, or SIGLEC10 ECD. In another aspect, an ECD-ECD comprises VEGFR ECD and TGFbRII ECD (VEGFR ECD-Fc-TGFbRII ECD).

[0560] In another embodiment, the VEGF/VEGFR binding fusion protein of the invention simultaneously binds and disables a-IL17R or IL17. In one aspect, the ALT comprises an IL17R antibody fused to VEGFR ECD. In another aspect, a VEGF or VEFR antibody is fused to an anti-IL17 nanobody. In another aspect, VEFR ECD is fused to an anti-IL17 nanobody. In another embodiment, the VEGF/VEGFR binding ALT simultaneously binds and disables a-IL6R or IL6. In one aspect, the ALT comprises an IL6R or IL6 binding antibody fused to VEGFR ECD. In another embodiment, the VEGF/VEGFR binding ALT simultaneously binds and disables a-IL23 or IL23R. In one aspect, the ALT comprises an IL23 or IL23R binding antibody fused to VEGFR ECD. In another embodiment, the VEGF/VEGFR binding ALT simultaneously binds and disables a-IL1 or IL1R. In one aspect, the ALT comprises an IL1 or IL1R binding antibody fused to VEGFR ECD. In an additional aspect, the ALT may be any antibody (targeting IL17, IL17R, IL23, IL23R, IL1, IL1R, IL6, or IL6R) wherein the heavy chain is fused to VEGFR ECD, and the light chain is fused to another receptor ECD (e.g. SIRPa ECD; BTLA ECD, TIM3 ECD, or PD1 ECD).

[0561] In another preferred embodiment the VEGF/VEGFR binding fusion protein of the invention binds VEGF and a co-inhibitory molecule. In one aspect a the ALT comprises an antibody that binds a T cell co-inhibitory molecule (e.g. CTLA-4, PD-L1, TIM3, BTLA, HVEM, TIGIT, PVRIG, PVRL2, PVR, VISTA, VSIG8) is fused to VEGFR ECD (e.g. a-CTLA4-VEGFR, a-PDL1-VEGFR, a-PD1-VEGFR, a-TIM3-VEGFR, a-BTLA mAb-VEGFR, a-HVEM mAb-VEGFR). In an additional aspect, the ALT may comprise the antibody wherein the heavy chain is fused to VEGFR ECD, and the light chain is fused to another receptor ECD (e.g. SIRPacd; BTLA ECD, TIM3 ECD, or PD1 ECD). In another aspect the ECD-ECD comprises VEGFR ECD and another receptor that binds a ligand expressed on tumor cells (e.g. PDL1/2, HVEM, CEACAM1/5, SIRPa). Examples of such ECD-ECDs include (VEGFR ECD-Fc-BTLA ECD, VEGFR ECD-Fc-PD1 ECD, VEGFR ECD-Fc-TIM3 ECD, VEGFR ECD-Fc-SIRPa ECD, VEGFR ECD-Fc-SIGLEC10 ECD).

[0562] In another embodiment, the VEGF/VEGFR binding fusion protein of the invention binds VEGF and a T cell co-stimulatory molecule. In one aspect a the ALT comprises an antibody that binds a T cell co-stumulatory molecule (e.g. 41BB, OX40, CD40, ICOS, GITR, DNAM) is fused to VEGFR ECD (e.g. a-41BB-VEGFR ECD, a-OX40-VEGFR ECD, a-CD40-VEGFR ECD, a-ICOS-VEGFR ECD, a-GITR-VEGFR ECD, a-DNAM-VEGFR ECD). In another aspect, the ALT may be any antibody wherein the heavy chain is fused to VEGFR ECD, and the light chain is fused to another receptor ECD (e.g. SIRPa ECD; BTLA ECD, TIM3 ECD, or PD1 ECD, SIGLEC10 ECD). In another aspect the ECD-ECD comprises VEGFR ECD and another co-stimulatory ligand (e.g. 41BBL, OX40L, GITRL, CD40L, ICOSL). Examples of such ECD-ECDs include (VEGFR ECD-Fc-41BBL, VEGFR ECD-Fc-OX40L, VEGFR ECD-Fc-ICOSL).

[0563] In another embodiment, the VEGF/VEGFR binding fusion protein of the invention comprises an antibody that binds either CD73 or CD39, fused to VEGFR ECD (a-CD73-VEGFR ECD and a-CD39-VEGFR ECD). In another aspect, the ALT may be any antibody wherein the heavy chain is fused to VEGFR ECD, and the light chain is fused to another receptor ECD that binds a ligand expressed on tumor cells or the TME (e.g. SIRPa ECD; BTLA ECD, TIM3 ECD, or PD1 ECD, SIGLEC10 ECD).

[0564] In another aspect, the ALT may be any antibody wherein the heavy chain is fused to VEGFR ECD, and the light chain is fused to another receptor ECD that binds a ligand expressed on tumor cells or the TME (e.g. SIRPa ECD; BTLA ECD, TIM3 ECD, or PD1 ECD, SIGLEC10 ECD).

[0565] In one embodiment, the invention describes TGFb or TGFbR blocking fusion proteins. In various aspects, the fusion proteins are an ALT or ECD-ECD comprising an antibody that binds TGFb, TGFbR, GARP, or LAP, or comprising TGFbRII ECD. In various embodiments, the ALT or ECD-ECD enables preferential localization of TGFb blockade to the TME.

[0566] In one aspect, the TGFb/TGFBR blocking ALT comprises a tumor targeted antibody fused to TGFbRII ECD. In various examples, without being limited to them, the ALT comprises an antibody that targets a tumor-associated cell surface antigen or molecule fused to TGFbRII ECD (e.g. anti-HER2-TGFbRII ECD; anti-EGFR-TGFbRII ECD; anti-EGFRvIII-TGFbRII ECD; anti-PSMA-TGFbRII ECD; anti-CEA-TGFbRII ECD). In another aspect, the light chain of the ALT may be additionally fused to a receptor ECD that binds a ligand expressed on tumor cells or the TME. In various examples the additional receptor ECD fused to the light chain is PD1 ECD, TIM3 ECD, BTLA ECD, SIRPa ECD, or SIGLEC10 ECD.

[0567] In another aspect the ALT may be any antibody wherein the heavy chain is fused to TGFbRII ECD, and the light chain is fused to another receptor ECD that binds a ligand expressed on tumor cells or the TME. In various examples the additional receptor ECD fused to the light chain is PD1 ECD, TIM3 ECD, BTLA ECD, SIRPa ECD, or SIGLEC10 ECD.

[0568] In another aspect, the TGFb/TGFBR blocking ALT comprises a TGFb or TGFBR or GARP or LAP binding antibody fused to a receptor ECD that binds a ligand expressed on tumor cells or the TME. In various examples the ALT contains PD1 ECD to bind PDL1/2 on tumor cells (e.g. anti-TGFb-PD1 ECD; anti-LAP-PD1 ECD; anti-GARP-PD1 ECD), or BTLA ECD to bind HVEM on tumor cells (anti-TGFb-BTLA ECD; anti-LAP-BTLA ECD; anti-GARP-BTLA ECD), or TIM3 ECD to bind CEACAM1/5 on tumor cells (anti-TGFb-TIM3 ECD; anti-LAP-TIM3 ECD; anti-GARP-TIM3 ECD), or SIRPa ECD to bind CD47 on tumor cells (anti-TGFb-SIRP ECD; anti-LAP-SIRPa ECD; anti-GARP-SIRPa ECD)) or SIGLEC10 ECD. In another aspect, the ALT may be TGFb or TGFBR or GARP or LAP binding antibody wherein the heavy chain is fused to one receptor ECD, and the light chain is fused to another receptor ECD that binds a ligand expressed on tumor cells or the TME (e.g. SIRPa ECD; BTLA ECD, TIM3 ECD, or PD1 ECD, or SIGLEC10 ECD). In another embodiment, the TGFb-binding ECD-ECD may comprise a polypeptide containing TGFbRII ECD and a receptor ECD that binds a ligand expressed on tumor cells or the TME (e.g. PD1 ECD, BTLA ECD, TIM3 ECD, SIRPa ECD, SIGLEC10 ECD).

[0569] In another preferred embodiment the TGFb/TGFBR blocking ALT or ECD-ECD simultaneously binds CD47. In one aspect, the ALT comprises a CD47 binding antibody fused to TGFbRII ECD. In another aspect the heavy chain is fused to TGFbRII ECD, and the light chain is fused to another receptor ECD that binds a ligand expressed on tumor cells or the TME. In various examples the additional receptor ECD fused to the light chain is PD1 ECD, TIM3 ECD, BTLA ECD, SIRPa ECD, or SIGLEC10 ECD. In another aspect, the ALT comprises a TGFb or TGFbR or LAP or GARP binding antibody fused to SIRPa ECD. In another aspect, the heavy chain is fused to SIRPa ECD, and the light chain is fused to another receptor ECD that binds a ligand expressed on tumor cells or the TME (e.g. BTLA ECD, TIM3 ECD, or PD1 ECD, or SIGLEC10 ECD). In another aspect, the ECD-ECD comprises TGFbRII ECD and SIRPa ECD (e.g. TGFbRII ECD-Fc-SIRPa ECD; SIRPa ECD-Fc-TGFbRII ECD).

[0570] In a preferred embodiment, the TGFb/TGFBR blocking ALT or ECD-ECD binds TGFb or TGFbR or LAP or GARP, and disrupts a ligand/receptor that promotes TH17 cell differentiation/function and angiogenesis in the TME.

[0571] In another embodiment, the TGFb/TGFBR blocking fusion protein of the invention binds VEGF and either TGFb, TGFbR, LAP or GARP. In one aspect a TGFb or TGFBR or GARP or LAP binding antibody is fused to VEGFR ECD. In another aspect, the ALT may be a TGFb or TGFBR or GARP or LAP binding antibody wherein the heavy chain is fused to VEGFR ECD, and the light chain is fused to another receptor ECD that binds a ligand expressed on tumor cells or the TME (e.g. SIRPa ECD; BTLA ECD, TIM3 ECD, or PD1 ECD or SIGLEC10 ECD). In another aspect, a VEGF or VEGFR binding antibody is fused to TGFbRII ECD. In another aspect, the ALT may be a VEGF or VEGFR antibody wherein the heavy chain is fused to TGFbRII ECD, and the light chain is fused to another receptor ECD that binds a ligand expressed on tumor cells or the TME (e.g. SIRPa ECD; BTLA ECD, TIM3 ECD, or PD1 ECD or SIGLEC10 ECD). In another aspect, an ECD-ECD comprises VEGFR ECD and TGFbRII ECD (VEGFR ECD-Fc-TGFbRII ECD).

[0572] In another embodiment, the TGFb/TGFBR blocking ALT simultaneously binds and disables a-IL17R or IL17. In one aspect, the ALT comprises an IL17R antibody fused to TGFbRII ECD. In another aspect, a TGFb or TGFBR or GARP or LAP binding antibody is fused to an anti-IL17 nanobody. In another aspect, TGFbRII ECD is fused to an anti-IL17 nanobody. In another embodiment, the TGFb/TGFBR blocking ALT simultaneously binds and disables a-IL6R or IL6. In one aspect, the ALT comprises an IL6R or IL6 binding antibody fused to TGFbRII ECD. In another embodiment, the TGFb/TGFBR blocking ALT simultaneously binds and disables a-IL23 or IL23R. In one aspect, the ALT comprises an IL23 or IL23R binding antibody fused to TGFbRII ECD. In another embodiment, the TGFb/TGFBR blocking ALT simultaneously binds and disables a-IL1 or IL1R. In one aspect, the ALT comprises an IL1 or IL1R binding antibody fused to TGFbRII ECD. In another aspect, the light chain of the ALT comprising an antibody (that targets IL17R, IL17, IL23R, IL23, IL6R, IL6, IL1R, or IL1) may be additionally fused to a receptor ECD that binds a ligand expressed on tumor cells or the TME. In various examples the additional receptor ECD fused to the light chain is PD1 ECD, TIM3 ECD, BTLA ECD, SIRPa ECD, or SIGLEC10 ECD.

[0573] In another preferred embodiment the TGFb/TGFBR binding ALT or ECD-ECD binds either TGFb or TGFbR or GARP or LAP, and a co-inhibitory molecule. In one aspect a the ALT comprises an antibody that binds a T cell co-inhibitory molecule (e.g. CTLA-4, PD-L1, TIM3, BTLA, HVEM, TIGIT, PVRIG, PVRL2, PVR, VISTA, VSIG8) is fused to TGFbRII ECD (e.g. a-CTLA4-TGFbRII, a-PDL1-TGFbRII, a-PD1-TGFbRII, a-TIM3-TGFbRII, a-BTLA mAb-TGFbRII, a-HVEM-TGFbRII). In an additional aspect, the ALT may comprise the antibody wherein the heavy chain is fused to TGFbRII ECD, and the light chain is fused to another receptor ECD that binds a ligand expressed on tumor cells or the TME (e.g. SIRPa ECD; BTLA ECD, TIM3 ECD, or PD1 ECD or SIGLEC10 ECD). In another aspect the ECD-ECD comprises TGFbRII ECD and another receptor ECD that binds a ligand expressed on tumor cells (e.g. PDL1/2, HVEM, CEACAM1/5, SIRPa). Examples of such ECD-ECDs include (TGFbRII ECD-Fc-BTLA ECD, TGFbRII ECD-Fc-PD1 ECD, TGFbRII ECD-Fc-TIM3 ECD, TGFbRII ECD-Fc-SIRPa ECD, TGFbRII ECD-Fc-SIGLEC10 ECD).

[0574] In another embodiment, the TGFb/TGFBR binding ALT or ECD-ECD binds TGFb and a T cell co-stimulatory molecule. In one aspect a the ALT comprises an antibody that binds a T cell co-stimulatory molecule (e.g. 41BB, OX40, CD40, ICOS, GITR, DNAM) is fused to TGFbRII ECD (e.g. a-41BB-TGFbRII ECD, a-OX40-TGFbRII ECD, a-CD40-TGFbRII ECD, a-ICOS-TGFbRII ECD, a-GITR-TGFbRII ECD, a-DNAM-TGFbRII ECD). In another aspect, the ALT may be any antibody wherein the heavy chain is fused to TGFbRII ECD, and the light chain is fused to another receptor ECD that binds a ligand expressed on tumor cells or the TME (e.g. SIRPa ECD; BTLA ECD, TIM3 ECD, or PD1 ECD, SIGLEC10 ECD). In another aspect the ECD-ECD comprises TGFbRII ECD and another co-stimulatory ligand (e.g. 41BBL, OX40L, GITRL, CD40L, ICOSL). Examples of such ECD-ECDs include (TGFbRII ECD-Fc-41BBL, TGFbRII ECD-Fc-OX40L, TGFbRII ECD-Fc-ICOSL).

[0575] In another embodiment, the TGFb/TGFbR binding ALT or ECD-ECD comprises an antibody that binds either CD73 or CD39, fused to TGFbRII ECD (a-CD73-TGFbRII and a-CD39-TGFbRII)

[0576] In another aspect, the ALT may be any antibody wherein the heavy chain is fused to TGFbRIIR ECD, and the light chain is fused to another receptor ECD that binds a ligand expressed on tumor cells or the TME (e.g. SIRPa ECD; BTLA ECD, TIM3 ECD, or PD1 ECD, SIGLEC10 ECD).

[0577] In one embodiment, an ALT comprises an antibody that binds a TH17-associated cytokine or cytokine receptor fused to a receptor ECD that binds a ligand expressed on tumor cells or the TME. In various examples the additional receptor ECD fused to the heavy or light chain is TGFbRII ECD, VEGFR ECD, PD1 ECD, TIM3 ECD, BTLA ECD, SIRPa ECD, or SIGLEC10 ECD. In one aspect a first receptor ECD is fused to the heavy chain and a second receptor ECD is fused to the light chain. In another aspect, the ALT may be an antibody wherein the heavy chain is fused to either TGFbRII R ECD or VEGFR ECD, and the light chain is fused to another receptor ECD (e.g. SIRPa ECD; BTLA ECD, TIM3 ECD, or PD1 ECD, SIGLEC10 ECD).

[0578] In some embodiments, fusion proteins of the invention disrupt cytokines/cytokine receptor interactions involved in TH17 cell differentiation and function: IL23/IL23R, IL1/IL1R, IL6/IL6R; IL17/IL17R.

[0579] In one embodiment the ALT comprises an antibody that binds IL17R, fused to one or more of the following: TGFbRII ECD, VEGFR ECD, PD1 ECD, TIM3 ECD, BTLA ECD, SIRPa ECD, or SIGLEC10 ECD. Exemplary molecules include anti-IL17R-TGFbRII ECD, anti-IL17R-VEGFR ECD, anti-IL17R-PD1 ECD, anti-IL17R-TIM3 ECD, anti-IL17R-BTLA ECD, anti-IL17R-SIRPa ECD, or anti-IL17R-SIGLEC10 ECD. In one aspect a first receptor ECD is fused to the heavy chain and a second receptor ECD is fused to the light chain. In one aspect, the heavy chain is fused to either TGFbRII or VEGFR ECD, and the light chain is fused to an additional receptor ECD selected from the following PD1 ECD, TIM3 ECD, BTLA ECD, SIRPa ECD, or SIGLEC10 ECD. Examples of these ALTs include anti-IL17R-TGFbRII ECD-BTLA ECD, anti-IL17R-TGFbRII ECD-PD1 ECD, anti-IL17R-VEGFR ECD-PD1 ECD, anti-IL17R-VEGFR ECD-BTLA ECD, anti-IL17R-BTLA ECD-PD1 ECD, anti-IL17R-BTLA ECD-SIRPa ECD, anti-IL17R-BTLA ECD-TIM3 ECD, anti-IL17R-SIRPa ECD-PD1 ECD.

[0580] In one embodiment the ALT comprises an antibody that binds IL23 or IL23R, fused to one or more of the following: TGFbRII ECD, VEGFR ECD, PD1 ECD, TIM3 ECD, BTLA ECD, SIRPa ECD, or SIGLEC10 ECD. Exemplary molecules include: anti-IL23-TGFbRII ECD, anti-1L23-VEGFR ECD, anti-IL23-PD1 ECD, anti-IL23-TIM3 ECD, anti-IIL23-BTLA ECD, anti-IIL23-SIRPa ECD, or anti-IL23-SIGLEC10 ECD. In one aspect, the heavy chain is fused to either TGFbRII or VEGFR ECD, and the light chain is fused to an additional receptor ECD selected from the following PD1 ECD, TIM3 ECD, BTLA ECD, SIRPa ECD, or SIGLEC10 ECD. Examples of these ALTs include anti-IL23R-TGFbRII ECD-BTLA ECD, anti-IL23R-TGFbRII ECD-BTLA ECD, anti-IL23R/IL23-TGFbRII ECD-PD1 ECD, anti-IL23R/IL23-VEGFR ECD-BTLA ECD. anti-IL23R/IL23-VEGFR ECD-BTLA ECD, anti-IL123R/IL23-BTLA ECD-PD1 ECD.

[0581] In one embodiment the ALT comprises an antibody that binds IL6R or IL6, fused to one or more of the following: TGFbRII ECD, VEGFR ECD, PD1 ECD, TIM3 ECD, BTLA ECD, SIRPa ECD, or SIGLEC10 ECD. In one embodiment the ALT comprises an antibody that binds IL1R or IL1, fused to one or more of the following: TGFbRII ECD, VEGFR ECD, PD1 ECD, TIM3 ECD, BTLA ECD, SIRPa ECD, or SIGLEC10 ECD. In one aspect, the heavy chain of the antibody is fused to either TGFbRII or VEGFR ECD, and the light chain is fused to an additional receptor ECD selected from the following PD1 ECD, TIM3 ECD, BTLA ECD, SIRPa ECD, or SIGLEC10 ECD.

[0582] In one embodiment, the present invention provides method of treating a subject having a disease or disorder comprising administering to the subject a fusion protein of the invention. In certain embodiments the patient has cancer.

[0583] The term “treatment” is used interchangeably herein with the term “therapeutic method” and refers to both 1) therapeutic treatments or measures that cure, slow down, lessen symptoms of, and/or halt progression of a diagnosed pathologic conditions or disorder, and 2) and prophylactic/preventative measures. Those in need of treatment may include individuals already having a particular medical disorder as well as those who may ultimately acquire the disorder (i.e., those needing preventive measures).

[0584] The term “cancer” refers to a group diseases characterized by abnormal and uncontrolled cell proliferation starting at one site (primary site) with the potential to invade and to spread to others sites (secondary sites, metastases) which differentiate cancer (malignant tumor) from benign tumor. Virtually all the organs can be affected, leading to more than 100 types of cancer that can affect humans. Cancers can result from many causes including genetic predisposition, viral infection, exposure to ionizing radiation, exposure environmental pollutant, tobacco and or alcohol use, obesity, poor diet, lack of physical activity or any combination thereof. As used herein, “neoplasm” or “tumor” including grammatical variations thereof, means new and abnormal growth of tissue, which may be benign or cancerous. In a related aspect, the neoplasm is indicative of a neoplastic disease or disorder, including but not limited, to various cancers. For example, such cancers can include prostate, pancreatic, biliary, colon, rectal, liver, kidney, lung, testicular, breast, ovarian, pancreatic, brain, and head and neck cancers, melanoma, sarcoma, multiple myeloma, leukemia, lymphoma, and the like.

[0585] The terms “therapeutically effective amount”, “effective dose,” “therapeutically effective dose”, “effective amount,” or the like refer to that amount of the subject compound that will elicit the biological or medical response of a tissue, system, animal or human that is being sought by the researcher, veterinarian, medical doctor or other clinician.

[0586] The terms “administration of” and or “administering” should be understood to mean providing a pharmaceutical composition in a therapeutically effective amount to the subject in need of treatment. Administration routes can be enteral, topical or parenteral. As such, administration routes include but are not limited to intracutaneous, subcutaneous, intravenous, intraperitoneal, intraarterial, intrathecal, intracapsular, intraorbital, intracardiac, intradermal, transdermal, transtracheal, subcuticular, intraarticulare, subcapsular, subarachnoid, intraspinal and intrasternal, oral, sublingual buccal, rectal, vaginal, nasal ocular administrations, as well infusion, inhalation, and nebulization. The phrases “parenteral administration” and “administered parenterally” as used herein means modes of administration other than enteral and topical administration. The pharmaceutical compositions can be administered in a variety of unit dosage forms depending upon the method of administration. Suitable unit dosage forms, include, but are not limited to powders, tablets, pills, capsules, lozenges, suppositories, patches, nasal sprays, injectables, implantable sustained-release formulations, lipid complexes, etc.

[0587] In some aspects administration can be in combination with one or more additional therapeutic agents. The phrases “combination therapy”, “combined with” and the like refer to the use of more than one medication or treatment simultaneously to increase the response. The fusion proteins of the present invention might for example be used in combination with other drugs or treatment in use to treat cancer. Specifically the administration of the composition of the present invention to a subject can be in combination with any anti-cancer therapies. Such therapies can be administered prior to, simultaneously with, sequentially with or following administration of the fusion protein of the present invention.

[0588] The term “anti-cancer therapy” or “anti-cancer treatment” as used herein is meant to refer to any treatment that can be used to treat cancer, such as surgery, radiotherapy, chemotherapy, immunotherapy, and checkpoint inhibitor therapy.

[0589] Examples of chemotherapy include treatment with a chemotherapeutic, cytotoxic or antineoplastic agents including, but not limited to, (i) anti-microtubules agents comprising vinca alkaloids (vinblastine, vincristine, vinflunine, vindesine, and vinorelbine), taxanes (cabazitaxel, docetaxel, larotaxel, ortataxel, paclitaxel, and tesetaxel), epothilones (ixabepilone), and podophyllotoxin (etoposide and teniposide); (ii) antimetabolite agents comprising anti-folates (aminopterin, methotrexate, pemetrexed, pralatrexate, and raltitrexed), and deoxynucleoside analogues (azacitidine, capecitabine, carmofur, cladribine, clofarabine, cytarabine, decitabine, doxifluridine, floxuridine, fludarabine, fluorouracil, gemcitabine, hydroxycarbamide, mercaptopurine, nelarabine, pentostatin, tegafur, and thioguanine); (iii) topoisomerase inhibitors comprising Topoisomerase I inhibitors (belotecan, camptothecin, cositecan, gimatecan, exatecan, irinotecan, lurtotecan, silatecan, topotecan, and rubitecan) and Topoisomerase II inhibitors (aclarubicin, amrubicin, daunorubicin, doxorubicin, epirubicin, etoposide, idarubicinm, merbarone, mitoxantrone, novobiocin, pirarubicin, teniposide, valrubicin, and zorubicin); (iv) alkylating agents comprising nitrogen mustards (bendamustine, busulfan, chlorambucil, cyclophosphamide, estramustine phosphate, ifosamide, mechlorethamine, melphalan, prednimustine, trofosfamide, and uramustine), nitrosoureas (carmustine (BCNU), fotemustine, lomustine (CCNU), N-Nitroso-N-methylurea (MNU), nimustine, ranimustine semustine (MeCCNU), and streptozotocin), platinum-based (cisplatin, carboplatin, dicycloplatin, nedaplatin, oxaliplatin and satraplatin), aziridines (carboquone, thiotepa, mytomycin, diaziquone (AZQ), triaziquone and triethylenemelamine), alkyl sulfonates (busulfan, mannosulfan, and treosulfan), non-classical alkylating agents (hydrazines, procarbazine, triazenes, hexamethylmelamine, altretamine, mitobronitol, and pipobroman), tetrazines (dacarbazine, mitozolomide and temozolomide); (v) anthracyclines agents comprising doxorubicin and daunorubicin. Derivatives of these compounds include epirubicin and idarubicin; pirarubicin, aclarubicin, and mitoxantrone, bleomycins, mitomycin C, mitoxantrone, and actinomycin; (vi) enzyme inhibitors agents comprising FI inhibitor (Tipifarnib), CDK inhibitors (Abemaciclib, Alvocidib, Palbociclib, Ribociclib, and Seliciclib), PrI inhibitor (Bortezomib, Carfilzomib, and Ixazomib), PhI inhibitor (Anagrelide), IMPDI inhibitor (Tiazofurin), LI inhibitor (Masoprocol), PARP inhibitor (Niraparib, Olaparib, Rucaparib), HDAC inhibitor (Belinostat, Panobinostat, Romidepsin, Vorinostat), and PIKI inhibitor (Idelalisib); (vii) receptor antagonist agent comprising ERA receptor antagonist (Atrasentan), Retinoid X receptor antagonist (Bexarotene), Sex steroid receptor antagonist (Testolactone); (viii) ungrouped agent comprising Amsacrine, Trabectedin, Retinoids (Alitretinoin Tretinoin) Arsenic trioxide, Asparagine depleters (Asparaginase/Pegaspargase), Celecoxib, Demecolcine Elesclomol, Elsamitrucin, Etoglucid, Lonidamine, Lucanthone, Mitoguazone, Mitotane, Oblimersen, Omacetaxine mepesuccinate, and Eribulin.

[0590] Examples of immunotherapy include treatment with antibodies including, but not limited to, alemtuzumab, Avastin (bevacizumab), Bexxar (tositumomab), CDP 870, and CEA-Scan (arcitumomab), denosumab, Erbitux (cetuximab), Herceptin (trastuzumab), Humira (adalimumab), IMC-IIF 8, LeukoScan (sulesomab), MabCampath (alemtuzumab), MabThera (Rituximab), matuzumab, Mylotarg (gemtuzumab oxogamicin), natalizumab, NeutroSpec (Technetium (99mTc) fanolesomab), panitumamab, Panorex (Edrecolomab), ProstaScint (Indium-Ill labeled Capromab Pendetide), Raptiva (efalizumab), Remicade (infliximab), ReoPro (abciximab), rituximab, Simulect (basiliximab), Synagis (palivizumab), TheraCIM hR3, tocilizumab, Tysabri (natalizumab), Verluma (nofetumomab), Xolair (omalizumab), Zenapax (dacliximab), Zevalin (ibritumomab tiuxetan (IDEC-Y2B8) conjugated to yttrium 90), Gilotrif (afatinib), Lynparza (olaparib), Perj eta (pertuzumab), Otdivo (nivolumab), Bosulif (bosutinib), Cabometyx (cabozantinib), trastuzumab-dkst (Ogivri), Sutent (sunitinib malate), Adcetris (brentuximab vedotin), Alecensa (alectinib), Calquence (acalabrutinib), Yescarta (ciloleucel), Verzenio (abemaciclib), Keytruda (pembrolizumab), Aliqopa (copanlisib), Nerlynx (neratinib), Imfinzi (durvalumab), Darzalex (daratumumab), Tecentriq (atezolizumab), and Tarceva (erlotinib).

[0591] “Checkpoint inhibitor therapy” is a form of cancer treatment that uses immune checkpoints which affect immune system functioning. Immune checkpoints can be stimulatory or inhibitory. Tumors can use these checkpoints to protect themselves from immune system attacks. Checkpoint therapy can block inhibitory checkpoints, restoring immune system function. Checkpoint proteins include programmed cell death 1 protein (PDCD1, PD-1; also known as CD279) and its ligand, PD-1 ligand 1 (PD-L1, CD274), cytotoxic T-lymphocyte-associated protein 4 (CTLA-4), A2AR (Adenosine A2A receptor), B7-H3 (or CD276), B7-H4 (or VTCN1), BTLA (B and T Lymphocyte Attenuator, or CD272), IDO (Indoleamine 2,3-dioxygenase), MR (Killer-cell Immunoglobulin-like Receptor), LAG3 (Lymphocyte Activation Gene-3), TIM-3 (T-cell Immunoglobulin domain and Mucin domain 3), and VISTA (V-domain Ig suppressor of T cell activation).

[0592] In some embodiments the fusion proteins may be used in in combination with another therapy including surgery, chemotherapy, radiation therapy, targeted small molecules, anti-angiogenic therapy or immunotherapy. In certain embodiments the fusion protein is administered with another fusion protein. Immunotherapy may include any immuno-oncologic drug selected from a broad range of agents, including antibodies, vaccines, adjuvant therapies, cytokines, oncolytic viruses, bispecific molecules, and cellular therapies. In a specific embodiment, the molecules of the invention may be administered to a subject in combination with (Chimeric Antigen Receptor (CAR) T cell therapy.

[0593] In one embodiment, the present invention provides for compositions comprising the previously described molecule or fusion protein and a pharmaceutical carrier.

[0594] In an additional embodiment, the present invention provides a method of treating a subject having cancer comprising administering to the subject the previously described molecules, fusion proteins or compositions. In one aspect, the molecule, fusion protein or composition is administered by intracutaneous, subcutaneous, intravenous, intraperitoneal, intraarterial, intrathecal, intracapsular, intraorbital, intracardiac, intradermal, transdermal, transtracheal, subcuticular, intraarticulare, subcapsular, subarachnoid, intraspinal and intrasternal, oral, sublingual buccal, rectal, vaginal, nasal or ocular administrations, by infusion, inhalation, or nebulization or by parenteral administration.

[0595] The molecules of the invention may be used in conjunction or in combination with any other type of therapy including surgery, chemotherapy, radiation therapy, targeted small molecules, anti-angiogenic therapy or immunotherapy. Immunotherapy may include any immuno-oncologic drug selected from a broad range of agents, including antibodies, fusion proteins, vaccines, adjuvant therapies, cytokines, oncolytic viruses, bispecific molecules, and cellular therapies. In a specific embodiment, the molecules of the invention may be administered to a subject in combination with (Chimeric Antigen Receptor (CAR) T cell therapy. In various aspects, the molecules of the invention may be administered prior to, concurrently, sequentially, and/or following any other type of said therapy. In various aspects, the molecules of the invention may be administered in a composition with any other therapeutic agent.

[0596] In some embodiments, fusion proteins described in the invention and combination therapies counteract immune dysfunction in the tumor microenvironment. In some embodiments, fusion proteins described in the invention and combination therapies counteract angiogenesis in the tumor microenvironment.

[0597] In various embodiments, a subject may be administered one or more fusion proteins described in the invention. In some embodiments, the fusion proteins comprise one or more of TGFbRII ECD, VEGFR ECD, PD1 ECD, BTLA ECD, SIRPa ECD, TIM3 ECD, and SIGLEC10 ECD.

[0598] In various embodiments, a subject may be administered one or more fusion proteins described in the invention in combination with a polypeptide that disables an immune cell inhibitory molecule or T cell co-inhibitory molecule (e.g., CTLA-4, BTLA, TIM-3, CEACAM1, or CEACAM-5, TIGIT, PVRIG, VISTA, VSIG8, LAG-3, CD47, SIRPa, CD24, SIGLEC10, or LILRB1). In some embodiments, this polypeptide is an antibody. In other embodiments, the polypeptide is a fusion protein comprising the ECD of a T cell co-inhibitory molecule. In some embodiments, this polypeptide may be PD1-Fc, TIM3-Fc, or BTLA-Fc. In some embodiments, the polypeptide may be an anti-PD1/anti-PDL1 mAb. Exemplary such antibodies are anti-PD1 (e.g., nivolumab, pembrolizumab) and anti-PDL1 (e.g., durvalumab, avelumab, atezolizumab).

[0599] In various embodiments, a subject may be administered one or more fusion proteins described in the invention in combination with a second fusion protein described in the invention. In various aspects, this second fusion protein disables a T cell co-inhibitory molecule. In some embodiments, this second fusion protein comprises BTLA ECD, TIM-3 ECD, or PD-1 ECD.

[0600] In various embodiments, a subject may be administered one or more fusion proteins described in the invention in combination with an antibody or fusion protein that activates an T cell co-stimulatory molecule (e.g., OX40, 41BB, ICOS, GITR, HVEM, CD27, CD40, CD30, DNAM). In some embodiments, the fusion protein comprises the ECD of a T cell co-stimulatory ligand (e.g., OX40L, 41BBL, ICOSL, GITRL, LIGHT, CD70, CD40L, CD30L) that binds a T cell co-stimulatory receptor as an agonist. In one aspect, the T cell co-stimulatory ligand may be fused to a tumor-targeted antibody (e.g., anti-EGFR-LIGHT).

[0601] In various embodiments, a subject may be administered one or more fusion proteins described in the invention in combination with an inhibitor of TGFb/TGFbR. In some aspects, this TGFb/TGFbR inhibitor is selected from: a-TGFb antibody; a-TGFbR antibody; TGFbRII ECD containing fusion protein (e.g. TGFbRIIecd-Fc); TGFbR TKI (e.g. galunisertib); anti-GARP antibody; anti-LAP antibody; ALT comprising TGFbRII ECD; ALT that inhibits TGFb/TGFbR; fusion proteins described in this invention that inhibit TGFb/TGFbR.

[0602] In various embodiments, a subject may be administered one or more fusion proteins described in the invention in combination with an inhibitor of VEGF/VEGFR. In some aspects, the VEGF/VEGFR inhibitor may be selected from: anti-VEGF antibody (e.g., bevacizumab), anti-VEGFR antibody (e.g. ramucirumab), VEGFR kinase inhibitor (e.g., sunitinib, sorafenib, axitinib, cabozantinib, regorafenib, pazopanib, vandetanib, lenvatenib), or VEGFR ECD-Fc fusion protein (e.g., aflibercept).

[0603] In various embodiments, a subject may be administered one or more fusion proteins described in the invention in combination with an inhibitor of TH17 differentiation and/or function. In some aspects, this agent is an inhibitor of the interaction between IL23/IL23R, IL1/IL1R, IL6/IL6R, or IL17/IL17R. In some aspects, this agent is selected from: anti-IL17R antibody, anti-IL17 antibody, anti-IL17 nanobody; anti-IL6R antibody, anti-IL6 antibody; IL23 antibody, anti-IL23R antibody; anti-IL1R antibody, anti-IL1 antibody. In other aspects, this agent is a fusion protein described in the invention that inhibits IL23/IL23R, IL1/IL1R, IL6/IL6R, IL17/IL17R.

[0604] In various embodiments, a subject may be administered one or more fusion proteins described in the invention in combination with an immunocytokine or cytokine fusion protein comprising an active ligand or ligand fragment of IL12 or IL15.

[0605] In various embodiments, a subject may be administered one or more fusion proteins described in the invention in combination with a polypeptide that binds a tumor cell- or tumor antigen, tumor growth factor or growth factor receptor. In one aspect, this polypeptide is an antibody. In another aspect, this polypeptide is conjugated to a cytotoxic compound. In a further aspect, this polypeptide is an ADC. In a further aspect, this polypeptide is an ALT-DC.

[0606] In various embodiments, a subject may be administered one or more fusion proteins described in the invention in combination with a chimeric antigen receptor T cell (CAR T cell)

[0607] In various embodiments, a subject may be administered one or more fusion proteins described in the invention in combination with an immunotherapeutic agent.

[0608] In various embodiments, a subject may be administered one or more fusion proteins described in the invention in combination with an inhibitor of tumor cell signaling that promotes tumor cell survival, proliferation, invasion, and/or metastases; tumor angiogenesis; or immune dysfunction in the TME.

[0609] In various embodiments, a subject may be administered one or more fusion proteins described in the invention in combination with a chemotherapeutic or cytotoxic agent, a DNA repair inhibitor or PARP inhibitor, a tumor vaccine or viriolytic agent; or ionizing radiation.

[0610] Any VEGF or VEGFR-binding fusion protein of the invention may be used for the treatment of cancer. Any TGFb/TGFbR-inhibiting fusion protein of the invention may be used for the treatment of cancer. Any fusion protein of the invention that interrupts a cytokine/cytokine receptor interaction involved in TH17 cell differentiation or function may be used for the treatment of cancer. In some embodiments, this cytokine/cytokine receptor interaction involved in TH17 inhibition is selected from IL23/IL23R, IL1/IL1R, IL6/IL6R, or IL17/IL17R.

[0611] In one embodiment, a VEGF or VEGFR-binding fusion protein of the invention may be used in combination with a TGF/TGFbR-inhibiting fusion protein of the invention for the treatment of cancer.

[0612] In another embodiment, a VEGF or VEGFR-binding fusion protein of the invention may be used in combination with a TGFb/TGFbR inhibitor for the treatment of cancer. In some aspects, this TGFb/TGFbR inhibitor is selected from: a-TGFb antibody; a-TGFbR antibody; TGFbRII ECD containing fusion protein (e.g. TGFbRIIecd-Fc); TGFbR TKI (e.g. galunisertib); anti-GARP antibody; anti-LAP antibody; ALT comprising TGFbRII ECD.

[0613] In another embodiment, a TGFb/TGFbR-inhibiting fusion protein of the invention may be used in combination with a VEGF/VEGFR inhibitor for the treatment of cancer. In some aspects, the VEGF/VEGFR inhibitor may be selected from: anti-VEGF antibody (e.g., bevacizumab), anti-VEGFR antibody (e.g. ramucirumab), VEGFR kinase inhibitor (e.g., sunitinib, sorafenib, axitinib, cabozantinib, regorafenib, pazopanib, vandetanib, lenvatenib), or VEGFR ECD-Fc fusion protein (e.g., aflibercept).

[0614] In another embodiment, a VEGF/VEGFR-inhibiting fusion protein of the invention may be used in combination with a fusion protein of the invention that counteracts TH17 differentiation or function for the treatment of cancer.

[0615] In another embodiment, a VEGF or VEGFR-binding fusion protein of the invention may be used in combination with an agent that counteracts TH17 differentiation or function for the treatment of cancer. In some aspects, this agent is an inhibitor of the interaction between IL23/IL23R, IL1/IL1R, IL6/IL6R, or IL17/IL17R. In some aspects, this agent is selected from: anti-IL17R antibody, anti-IL17 antibody, anti-IL17 nanobody; anti-IL6R antibody, anti-IL6 antibody; IL23 antibody, anti-IL23R antibody; anti-IL1R antibody, anti-IL1 antibody.

[0616] In another embodiment, a TGFb/TGFbR-inhibiting fusion protein of the invention may be used in combination with a fusion protein of the invention that counteracts TH17 differentiation or function for the treatment of cancer.

[0617] In another embodiment, a TGFb/TGFbR-inhibiting fusion protein of the invention may be used in combination with an agent that counteracts TH17 differentiation or function for the treatment of cancer. In some aspects, this agent is an inhibitor of the interaction between IL23/IL23R, IL1/IL1R, IL6/IL6R, or IL17/IL17R. In some aspects, this agent is selected from: anti-IL17R antibody, anti-IL17 antibody, anti-IL17 nanobody; anti-IL6R antibody, anti-IL6 antibody; IL23 antibody, anti-IL23R antibody; anti-IL1R antibody, anti-IL1 antibody.

[0618] In another embodiment, a fusion protein of the invention that counteracts TH17 differentiation or function may be used in combination with a TGFb/TGFbR inhibitor for the treatment of cancer. In some aspects, this TGFb/TGFbR inhibitor is selected from: a-TGFb antibody; a-TGFbR antibody; TGFbRII ECD containing fusion protein (e.g. TGFbRIIecd-Fc); TGFbR TKI (e.g. galunisertib); anti-GARP antibody; anti-LAP antibody; ALT comprising TGFbRII ECD.

[0619] In another embodiment, a fusion protein of the invention that counteracts TH17 differentiation or function may be used in combination with a VEGF/VEGFR inhibitor for the treatment of cancer. In some aspects, the VEGF/VEGFR inhibitor may be selected from: anti-VEGF antibody (e.g., bevacizumab), anti-VEGFR antibody (e.g. ramucirumab), VEGFR kinase inhibitor (e.g., sunitinib, sorafenib, axitinib, cabozantinib, regorafenib, pazopanib, vandetanib, lenvatenib), or VEGFR ECD-Fc fusion protein (e.g., aflibercept).

[0620] In another embodiment, a TGFb/TGFbR-inhibiting fusion protein of the invention may be used in combination with an agent that inhibits the interaction of CD47 and SIRPa. In some aspects, the CD47/SIRPa inhibitor may be selected from: a-CD47 mAb (e.g., magrolimab), a-SIRPa mAb, SIRPa containing fusion protein (e.g., SIRPa-Fc). In another aspect, the agent that inhibits the interaction of CD47 and SIRPa is a fusion protein of the invention.

[0621] In another embodiment, a VEGF/VEGFR-binding fusion protein of the invention may be used in combination with an agent that inhibits the interaction of CD47 and SIRPa. In some aspects, the CD47/SIRPa inhibitor may be selected from: a-CD47 mAb (e.g., magrolimab), a-SIRPa mAb, or SIRPa containing fusion protein (e.g., SIRPa-Fc). In another aspect, the agent that inhibits the interaction of CD47 and SIRPa is a fusion protein of the invention.

[0622] In another embodiment, a fusion protein of the invention that counteracts TH17 differentiation or function may be used in combination with an agent that inhibits the interaction of CD47 and SIRPa. In some aspects, the CD47/SIRPa inhibitor may be selected from: a-CD47 mAb (e.g., magrolimab), a-SIRPa mAb, or SIRPa containing fusion protein (e.g., SIRPa-Fc). In another aspect, the agent that inhibits the interaction of CD47 and SIRPa is a fusion protein of the invention.

[0623] In another embodiment, a CD47/SIRPa-binding fusion protein of the invention may be used in combination with a TGFb/TGFbR inhibitor for the treatment of cancer. In some aspects, this TGFb/TGFbR inhibitor is selected from: a-TGFb antibody; a-TGFbR antibody; TGFbRII ECD containing fusion protein (e.g. TGFbRIIecd-Fc); TGFbR TKI (e.g. galunisertib); anti-GARP antibody; anti-LAP antibody; ALT comprising TGFbRII ECD. In one embodiment, a-CD73-TGFbRII is combined with anti-CD47 or SIRPa-Fc for the treatment of cancer. In one aspect, the anti-CD47 polypeptide is magrolimab.

[0624] In another embodiment, a CD47/SIRPa-binding fusion protein of the invention may be used in combination with a VEGF/VEGFR inhibitor for the treatment of cancer. In some aspects, the VEGF/VEGFR inhibitor may be selected from: anti-VEGF antibody (e.g., bevacizumab), anti-VEGFR antibody (e.g. ramucirumab), VEGFR kinase inhibitor (e.g., sunitinib, sorafenib, axitinib, cabozantinib, regorafenib, pazopanib, vandetanib, lenvatenib), or VEGFR ECD-Fc fusion protein (e.g., aflibercept).

[0625] In another embodiment, a CD47/SIRPa-binding fusion protein of the invention may be used in combination with an agent that counteracts TH17 differentiation or function for the treatment of cancer. In some aspects, this agent is an inhibitor of the interaction between IL23/IL23R, IL1/IL1R, IL6/IL6R, or IL17/IL17R. In some aspects, this agent is selected from: anti-IL17R antibody, anti-IL17 antibody, anti-IL17 nanobody; anti-IL6R antibody, anti-IL6 antibody; IL23 antibody, anti-IL23R antibody; anti-IL1R antibody, anti-IL1 antibody.

[0626] In one embodiment, a polypeptide that simultaneously binds VEGF and a component of the tumor microenvironment is combined with a polypeptide that simultaneously binds TGFb and a component of the tumor microenvironment. In various aspects, the component of the tumor microenvironment may be a tumor cell surface molecule. In another aspect, the component of the tumor microenvironment may be a immune cell surface molecule associated with tumor-infilitrating T cells such as TH17 cells (e.g., IL-23R) or Tregs (e.g., CTLA-4).

[0627] In some embodiments, a fusion protein described in the invention that inhibits TGFb/TGFbR is used for treatment of cancer in combination with a fusion protein described in the invention that inhibits one or more of: PD1/PDL1, CD47/SIRPa, BTLA/HVEM, TIM3/CEACAM, VEGF/VEGFR, SIGLEC10/CD24. In some embodiments, a fusion protein described in the invention that inhibits PD1/PDL1 is used for treatment of cancer in combination with a fusion protein described in the invention that inhibits one or more of: TGFb/TGFbR, CD47/SIRPa, BTLA/HVEM, TIM3/CEACAM, VEGF/VEGFR, SIGLEC10/CD24. In some embodiments, a fusion protein described in the invention that inhibits CD47/SIRPa is used for treatment of cancer in combination with a fusion protein described in the invention that inhibits one or more of: TGFb/TGFbR, PD1/PDL1, BTLA/HVEM, TIM3/CEACAM, VEGF/VEGFR, SIGLEC10/CD24. In some embodiments, a fusion protein described in the invention that inhibits BTLA/HVEM is used for treatment of cancer in combination with a fusion protein described in the invention that inhibits one or more of: TGFb/TGFbR, CD47/SIRPa, PD1/PDL1, TIM3/CEACAM, VEGF/VEGFR, SIGLEC10/CD24. In some embodiments, a fusion protein described in the invention that inhibits TIM3/CEACAM is used for treatment of cancer in combination with a fusion protein described in the invention that inhibits one or more of: TGFb/TGFbR, CD47/SIRPa, BTLA/HVEM, PD1/PDL1, VEGF/VEGFR, SIGLEC10/CD24. In some embodiments, a fusion protein described in the invention that inhibits VEGF/VEGFR is used for treatment of cancer in combination with a fusion protein described in the invention that inhibits one or more of: TGFb/TGFbR, CD47/SIRPa, BTLA/HVEM, TIM3/CEACAM, PD1/PDL1, SIGLEC10/CD24. In some embodiments, a fusion protein described in the invention that inhibits SIGLEC10/CD24 is used for treatment of cancer in combination with a fusion protein described in the invention that inhibits one or more of: TGFb/TGFbR, CD47/SIRPa, BTLA/HVEM, TIM3/CEACAM, VEGF/VEGFR, PD1/PDL1.

[0628] Sequences of the components and fusion proteins of the invention are in Table 1

TABLE 1

| | Sequence |
|---|---|
| SEQ ID NO: 1 | QVQLQQWGAGLLKPSETLSLTCAVYGGSFSGYYWSWIRQSPEKGLEWIGEI |
| anti-41BB | NHGGYVTYNPSLESRVTISVDTSKNQFSLKLSSVTAADTAVYYCARDYGPG |
| antibody | NYDWYFDLWGRGTLVTVSSASTKGPSVFPLAPCSRSTSESTAALGCLVKD |
| (urelumab) - | YFPEPVTVSWNSGALTSGVHTFPAVLQSSGLYSLSSVVTVPSSSLGTKTYTC |
| heavy chain | NVDHKPSNTKVDKRVESKYGPPCPPCPAPEFLGGPSVFLFPPKPKDTLMISR |
| | TPEVTCVVVDVSQEDPEVQFNWYVDGVEVHNAKTKPREEQFNSTYRVVS |
| | VLTVLHQDWLNGKEYKCKVSNKGLPSSIEKTISKAKGQPREPQVYTLPPSQ |
| | EEMTKNQVSLTCLVKGFYPSDIAVEWESNGQPENNYKTTPPVLDSDGSFFL |
| | YSRLTVDKSRWQEGNVFSCSVMHEALHNHYTQKSLSLSLGK |
| SEQ ID NO: 2 | EIVLTQSPATLSLSPGERATLSCRASQSVSSYLAWYQQKPGQAPRLLIYDAS |
| anti-41BB | NRATGIPARFSGSGSGTDFTLTISSLEPEDFAVYYCQQRSNWPPALTFCGGT |
| antibody | KVEIKRTVAAPSVFIFPPSDEQLKSGTASVVCLLNNFYPREAKVQWKVDNA |
| (urelumab) - light | LQSGNSQESVTEQDSKDSTYSLSSTLTLSKADYEKHKVYACEVTHQGLSSP |
| chain | VTKSFNRGEC |
| SEQ ID NO: 3 | EVQLVESGGGLVQPGGSLRLSCAASGYSITNDYAWNWVRQAPGKGLEWV |
| anti-CA125 | GYISYSGYTTYNPSLKSRFTISRDTSKNTLYLQMNSLRAEDTAVYYCARWT |
| antibody (ab1) - | SGLDYWGQGTLVTVSSCSTKGPSVFPLAPSSKSTSGGTAALGCLVKDYFPE |
| heavy chain | PVTVSWNSGALTSGVHTFPAVLQSSGLYSLSSVVTVPSSSLGTQTYICNVNH |
| | KPSNTKVDKKVEPKSCDKTHTCPPCPAPELLGGPSVFLFPPKPKDTLMISRT |
| | PEVTCVVVDVSHEDPEVKFNWYVDGVEVHNAKTKPREEQYNSTYRVVSV |
| | LTVLHQDWLNGKEYKCKVSNKALPAPIEKTISKAKGQPREPQVYTLPPSRE |
| | EMTKNQVSLTCLVKGFYPSDIAVEWESNGQPENNYKTTPPVLDSDGSFFLY |
| | SKLTVDKSRWQQGNVFSCSVMHEALHNHYTQKSLSLSPGK |
| SEQ ID NO: 4 | DIQMTQSPSSLSASVGDRVTITCKASDLIHNWLAWYQQKPGKAFKLLIYGA |
| anti-CA125 | TSLETGVPSRFSGSGSGTDFTLTISSLQPEDFATYYCQQYWTTPFTFGQGTK |
| antibody (ab1) - | VEIKRTVAAPSVFIFPPSDEQLKSGTASVVCLLENFYPREAKVQWKVDNAL |
| light chain | QSGNSQESVTEQDSKDSTYSLSSTLTLSKADYEKHKVYACEVTHQGLSSFV |
| | TKSFERGEC |
| SEQ ID NO: 5 | EVQLVESGGGLVQPGGSLRLSCAASGYSITNDYAWNWVRQAPGKGLEWV |
| anti-CA125 | GYISYSGYTTYNPSLKSRFTISRDTSKNTLYLQMNSLRAEDTAVYYCARWT |
| antibody | SGLDYWGQGTLVTVSSASTKGPSVFPLAPSSKSTSGGTAALGCLVKDYFPE |
| (sofituzumab) - | PVTVSWNSGALTSGVHTFPAVLQSSGLYSLSSVVTVPSSSLGTQTYICNVNH |
| heavy chain | KPSNTKVDKKVEPKSCDKTHTCPPCPAPELLGGPSVFLFPPKPKDTLMISRT |
| | PEVTCVVVDVSHEDPEVKFNWYVDGVEVHNAKTKPREEQYNSTYRVVSV |
| | LTVLHQDWLNGKEYKCKVSNKALPAPIEKTISKAKGQPREPQVYTLPPSRE |
| | EMTKNQVSLTCLVKGFYPSDIAVEWESNGQPENNYKTTPPVLDSDGSFFLY |
| | SKLTVDKSRWQQGNVFSCSVMHEALHNHYTQKSLSLSPGK |
| SEQ ID NO: 6 | DIQMTQSPSSLSASVGDRVTITCKASDLIHNWLAWYQQKPGKAPKLLIYGA |
| anti-CA125 | TSLETGVPSRFSGSGSGTDFTLTISSLQPEDFATYYCQQYWTTPFTFGQGTK |
| antibody | VEIKRTVAAPSVFIFPPSDEQLKSGTASVVCLLNNFYPREAKVQWKVDNAL |
| (sofituzumab) - | QSGNSQESVTEQDSKDSTYSLSSTLTLSKADYEKHKVYACEVTHQGLSSPV |
| light chain | TKSFNRGEC |
| SEQ ID NO: 7 | QVQLVESGGGSVQPGRSLRLSCEASGFTFEAYAMHWVRQPPGKGLEWVSS |
| anti-CA19-9 | INWNSGRIAYADSVKGRFTISRDNARNSLYLQMNSLRLEDTAFYYCAKDIR |
| antibody (MVT- | RFSTGGAEFEYWGQGTLVTVSSASTKGPSVFPLAPSSKSTSGGTAALGCLV |
| 5873) - heavy | KDYFPEPVTVSWNSGALTSGVHTFPAVLQSSGLYSLSSVVTVPSSSLGTQTY |
| chain | ICNVNHKPSNTKVDKKVEPKSCDKTHTCPPCPAPELLGGPSVFLFPPKPKDT |
| | LMISRTPEVTCVVVDVSHEDPEVKFNWYVDGVEVHNAKTKPREEQYNSTY |
| | RVVSVLTVLHQDWLNGKEYKCKVSNKALPAPIEKTISKAKGQPREPQVYT |
| | LPPSREEMTKNQVSLTCLVKGFYPSDIAVEWESNGQPENNYKTTPPVLDSD |
| | GSFFLYSKLTVDKSRWQQGNVFSCSVMHEALHNHYTQKSLSLSPGK |
| SEQ ID NO: 8 | QSVLTQPPSASGTPGQRVTISCSGSSSNIGSNFVYWYQQLPGTAPKLLIYRN |
| anti-CA19-9 | NQRPSGVPDRFSGSRSGTSASLAISGLRSEDEADYYCAAWDDSLGGHYVFG |
| antibody (MVT- | TGTKVTVLGQPKAAPSVTLFPPSSEELQANKATLVCLISDFYPGAVTVAWK |
| 5873) - light chain | ADSSPVKAGVETTTPSKQSNNKYAASSYLSLTPEQWKSHRSYSCQVTHEGS |
| | TVEKTVAPTECS |
| SEQ ID NO: 9 | QVQLQQPGAELVKPGASVKMSCKASGYTFTSYNMHWVKQTPGRGLEWIG |
| anti-CD20 | AIYPGNGDTSYNQKFKGKATLTADKSSSTAYMQLSSLTSEDSAVYYCARST |
| antibody | YYGGDWYFNVWGAGTTVTVSAASTKGPSVFPLAPSSKSTSGGTAALGCLV |
| (rituximab) - | KDYFPEPVTVSWNSGALTSGVHTFPAVLQSSGLYSLSSVVTVPSSSLGTQTY |
| heavy chain | ICNVNHKPSNTKVDKKAEPKSCDKTHTCPPCPAPELLGGPSVFLFPPKPKDT |
| | LMISRTPEVTCVVVDVSHEDPEVKFNWYVDGVEVHNAKTKPREEQYNSTY |
| | RVVSVLTVLHQDWLNGKEYKCKVSNKALPAPIEKTISKAKGQPREPQVYT |
| | LPPSRDELTKNQVSLTCLVKGFYPSDIAVEWESNGQPENNYKTTPPVLDSD |
| | GSFFLYSKLTVDKSRWQQGNVFSCSVMHEALHNHYTQKSLSLSPGK |
| SEQ ID NO: 10 | QIVLSQSPAILSASPGEKVTMTCRASSSVSYIHWFQQKPGSSPKPWIYATSNL |
| anti-CD20 | ASGVPVRFSGSGSGTSYSLTISRVEAEDAATYYCQQWTSNPPTFGGGTKLEI |
| antibody | KRTVAAPSVFIFPPSDEQLKSGTASVVCLLNNFYPREAKVQWKVDNALQSG |
| (rituximab) - light | NSQESVTEQDSKDSTYSLSSTLTLSKADYEKHKVYACEVTHQGLSSPVTKS |
| chain | FNRGEC |
| SEQ ID NO: 11 | QIQLQQSGPEVVKPGASVKISCKASGYTFTDYYITWVKQKPGQGLEWIGWI |
| anti-CD30 | YPGSGNTKYNEKFKGKATLTVDTSSSTAFMQLSSLTSEDTAVYFCANYGN |
| antibody | YWFAYWGQGTQVTVSAASTKGPSVFPLAPSSKSTSGGTAALGCLVKDYFP |
| (brentuximab) - | EPVTVSWNSGALTSGVHTFPAVLQSSGLYSLSSVVTVPSSSLGTQTYICNVN |
| heavy chain | HKPSNTKVDKKVEPKSCDKTHTCPPCPAPELLGGPSVFLFPPKPKDTLMISR |
| | TPEVTCVVVDVSHEDPEVKFNWYVDGVEVHNAKTKPREEQYNSTYRVVS |
| | VLTVLHQDWLNGKEYKCKVSNKALPAPIEKTISKAKGQPREPQVYTLPPSR |
| | DELTKNQVSLTCLVKGFYPSDIAVEWESNGQPENNYKTTPPVLDSDGSFFL |
| | YSKLTVDKSRWQQGNVFSCSVMHEALHNHYTQKSLSLSPG |
| SEQ ID NO: 12 | DIVLTQSPASLAVSLGQRATISCKASQSVDFDGDSYMNWYQQKPGQPPKV |
| anti-CD30 | LIYAASNLESGIPARFSGSGSGTDFTLNIHPVEEEDAATYYCQQSNEDPWTF |
| antibody | GGGTKLEIKRTVAAPSVFIFPPSDEQLKSGTASVVCLLNNFYPREAKVQWK |
| (brentuximab) - | VDNALQSGNSQESVTEQDSKDSTYSLSSTLTLSKADYEKHKVYACEVTHQ |
| light chain | GLSSPVTKSFNRGEC |
| SEQ ID NO: 13 | QVQLQQSGAELAKPGASVKMSCKASGYTFTSYRMHWVKQRPGQGLEWIG |
| anti-CD33 | YINPSTGYTEYNQKFKDKATLTADKSSSTAYMQLSSLTFEDSAVYYCARGG |
| antibody | GVFDYWGQGTTLTVSSASTKGPSVFPLAPSSKSTSGGTAALGCLVKDYFPE |
| (gemtuzumab) - | PVTVSWNSGALTSGVHTFPAVLQSSGLYSLSSVVTVPSSSLGTQTYICNVNH |
| heavy chain | KPSNTKVDKKVEPKSCDKTHTCPPCPAPELLGGPSVFLFPPKPKDTLMISRT |
| | PEVTCVVVDVSHEDPEVKFNWYVDGVEVHNAKTKPREEQYNSTYRVVSV |
| | LTVLHQDWLNGKEYKCKVSNKALPAPIEKTISKAKGQPREPQVYTLPPSRD |
| | ELTKNQVSLTCLVKGFYPSDIAVEWESNGQPENNYKTTPPVLDSDGSFFLY |
| | SKLTVDKSRWQQGNVFSCSVMHEALHNHYTQKSLSLSPGK |
| SEQ ID NO: 14 | DIQMTQSPSTLSASVGDRVTITCRASQSINTWLAWYQQKPGKAPKLLMYK |
| anti-CD33 | ASSLESGVPSRFIGSGSGTEFTLTISSLQPDDFATYYCQQYNSDSKMFGQGT |
| antibody | KVEVKRTVAAPSVFIFPPSDEQLKSGTASVVCLLNNFYPREAKVQWKVDN |
| (gemtuzumab) - | ALQSGNSQESVTEQDSKDSTYSLSSTLTLSKADYEKHKVYACEVTHQGLSS |
| light chain | PVTKSFNRGEC |
| SEQ ID NO: 15 | EVQLLESGGGLVQPGGSLRLSCAVSGFTFNSFAMSWVRQAPGKGLEWVSA |
| anti-CD38 | ISGSGGGTYYADSVKGRFTISRDNSKNTLYLQMNSLRAEDTAVYFCAKDKI |
| antibody | LWFGEPVFDYWGQGTLVTVSSASTKGPSVFPLAPSSKSTSGGTAALGCLVK |
| (daratumumab) - | DYFPEPVTVSWNSGALTSGVHTFPAVLQSSGLYSLSSVVTVPSSSLGTQTYI |
| heavy chain | CNVNHKPSNTKVDKRVEPKSCDKTHTCPPCPAPELLGGPSVFLFPPKPKDT |
| | LMISRTPEVTCVVVDVSHEDPEVKFNWYVDGVEVHNAKTKPREEQYNSTY |
| | RVVSVLTVLHQDWLNGKEYKCKVSNKALPAPIEKTISKAKGQPREPQVYT |
| | LPPSREEMTKNQVSLTCLVKGFYPSDIAVEWESNGQPENNYKTTPPVLDSD |
| | GSFFLYSKLTVDKSRWQQGNVFSCSVMHEALHNHYTQKSLSLSPGK |
| SEQ ID NO: 16 | EIVLTQSPATLSLSPGERATLSCRASQSVSSYLAWYQQKPGQAPRLLIYDAS |
| anti-CD38 | NRATGIPARFSGSGSGTDFTLTISSLEPEDFAVYYCQQRSNWPPTFGQGTKV |
| antibody | EIKRTVAAPSVFIFPPSDEQLKSGTASVVCLLNNFYPREAKVQWKVDNALQ |
| (daratumumab) - | SGNSQESVTEQDSKDSTYSLSSTLTLSKADYEKHKVYACEVTHQGLSSPVT |
| light chain | KSFNRGEC |
| SEQ ID NO: 17 | QVOLVOSGSELKKPGASVKVSCKASGYTFTHYGMNWVRQAPGQGLKWM |
| anti-CD39 | GWINTYTGEPTYADDFKGRFVFSLDTSVSTAYLQISSLKAEDTAVYYCARR |
| antibody | RYEGNYVFYYFDYWGQGTTVTVSSASTKGPSVFPLAPSSKSTSGGTAALGC |
| (IPH5201) - heavy | LVKDYFPEPVTVSWNSGALTSGVHTFPAVLQSSGLYSLSSVVTVPSSSLGTQ |
| chain | TYICNVNHKPSNTKVDKKVEPKSCDKTHTCPPCPAPELLGGPSVFLFPPKPK |
| | DTLMISRTPEVTCVVVDVSHEDPEVKFNWYVDGVEVHNAKTKPREEQYNS |
| | TYRVVSVLTVLHQDWLNGKEYKCKVSNKALPAPIEKTISKAKGQPREPQV |
| | YTLPPSREEMTKNQVSLTCLVKGFYPSDIAVEWESNGQPENNYKTTPPVLD |
| | SDGSFFLYSKLTVDKSRWQQGNVFSCSVMHEALHNHYTQKSLSLSPGK |
| SEQ ID NO: 18 | DIQMTQSPSSLSASVGDRVTITCRASENIYSYFSWYOQKPGKAPKLLIYTAK |
| anti-CD39 | TLAEGVPSRFSGSGSGTDFTLTISSLOPEDFATYYCQHHYVTPYTFGGGTKV |
| antibody | EIKRTVAAPSVFIFPPSDEOLKSGTASVVCLLNNFYPREAKVOWKVDNAL0 |
| (IPH5201) - light | SGNSQESVTEQDSKDSTYSLSSTLTLSKADYEKHKVYACEVTHOGLSSPVT |
| chain | KSFNRGEC |
| SEQ ID NO: 19 | EVQLQESGPGLVKPSETLSLTCTVSGYSITSNYYWNWIRQPPGKGLEWMG |
| anti-CD40 | YIRYDGSNNYNPSLKNRVTISRDTSKNQFSLKLSSVTAADTAVYYCARLDY |
| antibody (ABBV- | WGQGTTVTVSSASTKGPSVFPLAPSSKSTSGGTAALGCLVKDYFPEPVTVS |
| 428) - heavy chain | WNSGALTSGVHTFPAVLQSSGLYSLSSVVTVPSSSLGTQTYICNVNHKPSNT |
| | KVDKKVEPKSCDKTHTCPPCPAPELLGGPSVFLFPPKPKDTLMISRTPEVTC |
| | VVVDVSHEDPEVKFNWYVDGVEVHNAKTKPREEQYNSTYRVVSVLTVLH |
| | QDWLNGKEYKCKVSNKALPAPIEKTISKAKGQPREPQVYTLPPSREEMTKN |
| | QVSLTCLVKGFYPSDIAVEWESNGQPENNYKTTPPVLDSDGSFFLYSKLTV |
| | DKSRWQQGNVFSCSVMHEALHNHYTQKSLSLSPGK |
| SEQ ID NO: 20 | DAVMTQTPLSLSVTPGQPASISCRSSQSLENTNGNTFLNWYLQKPGQSPQL |
| anti-CD40 | LIYRVSNRFSGVPDRFSGSGSGTDFTLKISRVEAEDVGVYYCLQVTHVPFTF |
| antibody (ABBV- | GQGTKLEIKRTVAAPSVFIFPPSDEQLKSGTASVVCLLNNFYPREAKVQWK |
| 428) - light chain | VDNALQSGNSQESVTEQDSKDSTYSLSSTLTLSKADYEKHKVYACEVTHQ |
| | GLSSPVTKSFNRGEC |
| SEQ ID NO: 21 | QVQLQQPGAELVKPGASVMMSCKASGYTFTNYNMHWVKQTPGQGLEWI |
| anti-CD47 | GTIYPGNDDTSYNQKFKDKATLTADKSSSAAYMQLSSLTSEDSAVYYCAR |
| antibody (5F9) - | GGYRAMDYWGQTSVTVSSASTKGPSVFPLAPSSKSTSGGTAALGCLVKDY |
| heavy chain | FPEPVTVSWNSGALTSGVHTFPAVLQSSGLYSLSSVVTVPSSSLGTQTYICN |
| | VNHKPSNTKVDKKVEPKSCDKTHTCPPCPAPELLGGPSVFLFPPKPKDTLMI |
| | SRTPEVTCVVVDVSHEDPEVKFNWYVDGVEVHNAKTKPREEQYNSTYRV |
| | VSVLTVLHQDWLNGKEYKCKVSNKALPAPIEKTISKAKGQPREPQVYTLPP |
| | SREEMTKNQVSLTCLVKGFYPSDIAVEWESNGQPENNYKTTPPVLDSDGSF |
| | FLYSKLTVDKSRWQQGNVFSCSVMHEALHNHYTQKSLSLSPGK |
| SEQ ID NO: 22 | DVLMTQTPLSLPVSLGDQASISCRSSQSIVYSNGNTYLGWYLQKPGQSPKL |
| anti-CD47 | LIYKVSNRFSGVPDRFSGSGSGTDFTLKISRVEAEDLGVYHCFQGSHVPYTF |
| antibody (5F9) - | GGGTKVEIKRTVAAPSVFIFPPSDEQLKSGTASVVCLLNNFYPREAKVQWK |
| light chain | VDNALQSGNSQESVTEQDSKDSTYSLSSTLTLSKADYEKHKVYACEVTHQ |
| | GLSSPVTKSFNRGEC |
| SEQ ID NO: 23 | EVQLVQSGAEVKKPGESLKISCKASGYAFSSSWINWVRQMPGKGLEWMG |
| anti-CD73 | RIYPRAGDTNYAGKFKDQVTISADKSISTAYLQWSSLKASDTAMYYCASLL |
| antibody | DYSMDYWGQGTLVTVSSASTKGPSVFPLAPSSKSTSGGTAALGCLVKDYF |
| (GS1423) - heavy | PEPVTVSWNSGALTSGVHTFPAVLQSSGLYSLSSVVTVPSSSLGTQTYICNV |
| chain | NHKPSNTKVDKKVEPKSCDKTHTCPPCPAPELLGGPSVFLFPPKPKDTLMIS |
| | RTPEVTCVVVDVSHEDPEVKFNWYVDGVEVHNAKTKPREEQYNSTYRVV |
| | SVLTVLHQDWLNGKEYKCKVSNKALPAPIEKTISKAKGQPREPQVYTLPPS |
| | REEMTKNQVSLTCLVKGFYPSDIAVEWESNGQPENNYKTTPPVLDSDGSFF |
| | LYSKLTVDKSRWQQGNVFSCSVMHEALHNHYTQKSLSLSPGK |
| SEQ ID NO: 24 | DIQMTQSPSSLSASVGDRVTITCRASQDISNYLNWYQQKPGKAPKLLIYYTS |
| anti-CD73 | RLHSGVPSRFSGSGSGTDFTFTISSLQPEDIATYYCQQGNTLPLTFGQGTKVE |
| antibody | IKRTVAAPSVFIFPPSDEQLKSGTASVVCLLNNFYPREAKVQWKVDNALQS |
| (GS1423) - light | GNSQESVTEQDSKDSTYSLSSTLTLSKADYEKHKVYACEVTHQGLSSPVTK |
| chain | SFNRGEC |
| SEQ ID NO: 25 | EVQLVESGGGVVQPGRSLRLSCSASGFDFTTYWMSWVRQAPGKGLEWIGE |
| anti-CEACAM5 | IHPDSSTINYAPSLKDRFTISRDNAKNTLFLQMDSLRPEDTGVYFCASLYFGF |
| antibody | PWFAYWGQGTPVTVSSASTKGPSVFPLAPSSKSTSGGTAALGCLVKDYFPE |
| (labetuzumab) - | PVTVSWNSGALTSGVHTFPAVLQSSGLYSLSSVVTVPSSSLGTQTYICNVNH |
| heavy chain | KPSNTKVDKRVEPKSCDKTHTCPPCPAPELLGGPSVFLFPPKPKDTLMISRT |
| | PEVTCVVVDVSHEDPEVKFNWYVDGVEVHNAKTKPREEQYNSTYRVVSV |
| | LTVLHQDWLNGKEYKCKVSNKALPAPIEKTISKAKGQPREPQVYTLPPSRE |
| | EMTKNQVSLTCLVKGFYPSDIAVEWESNGQPENNYKTTPPVLDSDGSFFLY |
| | SKLTVDKSRWQQGNVFSCSVMHEALHNHYTQKSLSLSPGK |
| | DIQLTQSPSSLSASVGDRVTITCKASQDVGTSVAWYQQKPGKAPKLLIYWT |
| SEQ ID NO: 26 | STRHTGVPSRFSGSGSGTDFTFTISSLQPEDIATYYCQQYSLYRSFGQGTKVE |
| anti-CEACAM5 | IKRTVAAPSVFIFPPSDEQLKSGTASVVCLLNNFYPREAKVQWKVDNALQS |
| antibody | GNSQESVTEQDSKDSTYSLSSTLTLSKADYEKHKVYACEVTHQGLSSPVTK |
| (labetuzumab) - | SFNRGEC |
| light chain | |
| SEQ ID NO: 27 | QVQLVESGGGVVQPGRSLRLSCAASGFTFSSYTMHWVRQAPGKGLEWVT |
| anti-CTLA4 | FISYDGNNKYYADSVKGRFTISRDNSKNTLYLQMNSLRAEDTAIYYCARTG |
| antibody | WLGPFDYWGQGTLVTVSSASTKGPSVFPLAPSSKSTSGGTAALGCLVKDYF |
| (ipilimumab) - | PEPVTVSWNSGALTSGVHTFPAVLQSSGLYSLSSVVTVPSSSLGTQTYICNV |
| heavy chain | NHKPSNTKVDKRVEPKSCDKTHTCPPCPAPELLGGPSVFLFPPKPKDTLMIS |
| | RTPEVTCVVVDVSHEDPEVKFNWYVDGVEVHNAKTKPREEQYNSTYRVV |
| | SVLTVLHQDWLNGKEYKCKVSNKALPAPIEKTISKAKGQPREPQVYTLPPS |
| | RDELTKNQVSLTCLVKGFYPSDIAVEWESNGQPENNYKTTPPVLDSDGSFF |
| | LYSKLTVDKSRWQQ |
| SEQ ID NO: 28 | EIVLTQSPGTLSLSPGERATLSCRASQSVGSSYLAWYQQKPGQAPRLLIYGA |
| anti-CTLA4 | FSRATGIPDRFSGSGSGTDFTLTISRLEPEDFAVYYCQQYGSSPWTFGQGTK |
| antibody | VEIKRTVAAPSVFIFPPSDEQLKSGTASVVCLLNNFYPREAKVQWKVDNAL |
| (ipilimumab) - | QSGNSQESVTEQDSKDSTYSLSSTLTLSKADYEKHKVYACEVTHQGLSSPV |
| light chain | TKSFNRGEC |
| SEQ ID NO: 29 | QVQLVQSGAEVKKPGASVKVSCKASGYTFTNYGMNWVRQAPGQGLEWM |
| anti-DLL3 | GWINTYTGEPTYADDFKGRVTMTTDTSTSTAYMELRSLRSDDTAVYYCAR |
| antibody | IGDSSPSDYWGQGTLVTVSSASTKGPSVFPLAPSSKSTSGGTAALGCLVKD |
| (rovalpituzumab) - | YFPEPVTVSWNSGALTSGVHTFPAVLQSSGLYSLSSVVTVPSSSLGTQTYIC |
| heavy chain | NVNHKPSNTKVDKKVEPKSCDKTHTCPPCPAPELLGGPSVFLFPPKPKDTL |
| | MISRTPEVTCVVVDVSHEDPEVKFNWYVDGVEVHNAKTKPREEQYNSTYR |
| | VVSVLTVLHQDWLNGKEYKCKVSNKALPAPIEKTISKAKGQPREPQVYTLP |
| | PSRDELTKNQVSLTCLVKGFYPSDIAVEWESNGQPENNYKTTPPVLDSDGS |
| | FFLYSKLTVDKSRWQQGNVFSCSVMHEALHNHYTQKSLSLSPG |
| SEQ ID NO: 30 | EIVMTQSPATLSVSPGERATLSCKASQSVSNDVVWYQQKPGQAPRLLIYYA |
| anti-DLL3 | SNRYTGIPARFSGSGSGTEFTLTISSLQSEDFAVYYCQQDYTSPWTFGQGTK |
| antibody | LEIKRTVAAPSVFIFPPSDEQLKSGTASVVCLLNNFYPREAKVQWKVDNAL |
| (rovalpituzumab) - | QSGNSQESVTEQDSKDSTYSLSSTLTLSKADYEKHKVYACEVTHQGLSSPV |
| light chain | TKSFNRGEC |
| SEQ ID NO: 31 | EVQLVESGGGLVQPGGSLRLSCAASGYTFTNYGMNWVRQAPGKGLEWVG |
| anti-DLL4 | WINTYTGEPTYAADFKRRFTFSLDTSKSTAYLQMNSLRAEDTAVYYCAKY |
| antibody (ABT- | PHYYGSSHWYFDVWGQGTLVTVSSASTKGPSVFPLAPSSKSTSGGTAALG |
| 165) - heavy chain | CLVKDYFPEPVTVSWNSGALTSGVHTFPAVLQSSGLYSLSSVVTVPSSSLGT |
| | QTYICNVNHKPSNTKVDKKVEPKSCDKTHTCPPCPAPEAAGGPSVFLFPPK |
| | PKDTLMISRTPEVTCVVVDVSHEDPEVKFNWYVDGVEVHNAKTKPREEQY |
| | NSTYRVVSVLTVLHQDWLNGKEYKCKVSNKALPAPIEKTISKAKGQPREP |
| | QVYTLPPSREEMTKNQVSLTCLVKGFYPSDIAVEWESNGQPENNYKTTPPV |
| | LDSDGSFFLYSKLTVDKSRWQQGNVFSCSVMHEALHNHYTQKSLSLSPGK |
| SEQ ID NO: 32 | DIQMTQSPSSLSASVGDRVTITCSASQDISNYLNWYQQKPGKAPKVLIYFTS |
| anti-DLL4 | SLHSGVPSRFSGSGSGTDFTLTISSLQPEDFATYYCQQYSTVPWTFGQGTKV |
| antibody (ABT- | EIKRTVAAPSVFIFPPSDEQLKSGTASVVCLLNNFYPREAKVQWKVDNALQ |
| 165) - light chain | SGNSQESVTEQDSKDSTYSLSSTLTLSKADYEKHKVYACEVTHQGLSSPVT |
| | KSFNRGEC |
| SEQ ID NO: 33 | QVQLVQSGAEVKKPGSSVKVSCKASGGTFSSYWIEWVRQAPGQGLEWMG |
| anti -DPEP3 | EILPGSGNTYYNERFKDRVTITADESTSTAYMELSSLRSEDTAVYYCARRA |
| antibody (ab1) - | AAYYSNPEWFAYWGQGTLVTVSSASTKGPSVFPLAPSSKSTSGGTAALGCL |
| heavy chain | VKDYFPEPVTVSWNSGALTSGVHTFPAVLQSSGLYSLSSVVTVPSSSLGTQT |
| | YICNVNHKPSNTKVDKKVEPKSCDKTHTCPPCPAPELLGGPSVFLFPPKPKD |
| | TLMISRTPEVTCVVVDVSHEDPEVKFNWYVDGVEVHNAKTKPREEQYNST |
| | YRVVSVLTVLHQDWLNGKEYKCKVSNKALPAPIEKTISKAKGQPREPQVY |
| | TLPPSRDELTKNQVSLTCLVKGFYPSDIAVEWESNGQPENNYKTTPPVLDS |
| | DGSFFLYSKLTVDKSRWQQGNVFSCSVMHEALHNHYTQKSLSLSPG |
| SEQ ID NO: 34 | EIVLTQSPATLSLSPGERATLSCTASSSVNSFYLHWYQQKPGLAPRLLIYSTS |
| anti-DPEP3 | NLASGIPDRFSGSGSGTDFTLTISRLEPEDFAVYYCHQYHRSPYTFGQGTKL |
| antibody (ab1) - | EIKRTVAAPSVFIFPPSDEQLKSGTASVVCLLNNFYPREAKVQWKVDNALQ |
| light chain | SGNSQESVTEQDSKDSTYSLSSTLTLSKADYEKHKVYACEVTHQGLSSPVT |
| | KSFNRGEC |
| SEQ ID NO: 35 | QVQLVQSGAEVKKPGSSVKVSCKASGGTFSSYWIEWVRQAPGQGLEWMG |
| anti-DPEP3 | EILPGSGNTYYNERFKDRVTITADESTSTAYMELSSLRSEDTAVYYCARRA |
| antibody (ab2) - | AAYYSNPEWFAYWGQGTLVTVSSASTKGPSVFPLAPSSKSTSGGTAALGCL |
| heavy chain | VKDYFPEPVTVSWNSGALTSGVHTFPAVLQSSGLYSLSSVVTVPSSSLGTQT |
| | YICNVNHKPSNTKVDKKVEPKSSDKTHTCPPCPAPELLGGPSVFLFPPKPKD |
| | TLMISRTPEVTCVVVDVSHEDPEVKFNWYVDGVEVHNAKTKPREEQYNST |
| | YRVVSVLTVLHQDWLNGKEYKCKVSNKALPAPIEKTISKAKGQPREPQVY |
| | TLPPSRDELTKNQVSLTCLVKGFYPSDIAVEWESNGQPENNYKTTPPVLDS |
| | DGSFFLYSKLTVDKSRWQQGNVFSCSVMHEALHNHYTQKSLSLSPG |
| SEQ ID NO: 36 | QVQLQESGPGLVKPSETLSLTCTVSGGSVSSGDYYWTWIRQSPGKGLEWIG |
| anti-EGFR | HIYYSGNTNYNPSLKSRLTISIDTSKTQFSLKLSSVTAADTAIYYCVRDRVTG |
| antibody | AFDIWGQGTMVTVSSASTKGPSVFPLAPCSRSTSESTAALGCLVKDYFPEPV |
| (panitumumab) - | TVSWNSGALTSGVHTFPAVLQSSGLYSLSSVVTVPSSNFGTQTYTCNVDHK |
| heavy chain | PSNTKVDKTVERKCCVECPPCPAPPVAGPSVFLFPPKPKDTLMISRTPEVTC |
| | VVVDVSHEDPEVQFNWYVDGVEVHNAKTKPREEQFNSTFRVVSVLTVVH |
| | QDWLNGKEYKCKVSNKGLPAPIEKTISKTKGQPREPQVYTLPPSREEMTKN |
| | QVSLTCLVKGFYPSDIAVEWESNGQPENNYKTTPPMLDSDGSFFLYSKLTV |
| | DKSRWQQGNVFSCSVMHEALHNHYTQKSLSLSPGK |
| SEQ ID NO: 37 | DIQMTQSPSSLSASVGDRVTITCQASQDISNYLNWYQQKPGKAPKLLIYDA |
| anti-EGFR | SNLETGVPSRFSGSGSGTDFTFTISSLQPEDIATYFCQHFDHLPLAFGGGTKV |
| antibody | EIKRTVAAPSVFIFPPSDEQLKSGTASVVCLLNNFYPREAKVQWKVDNALQ |
| (panitumumab) - | SGNSQESVTEQDSKDSTYSLSSTLTLSKADYEKHKVYACEVTHQGLSSPVT |
| light chain | KSFNRGEC |
| SEQ ID NO: 38 | QVQLQESGPGLVKPSQTLSLTCTVSGGSISSGDYYWSWIRQPPGKGLEWIG |
| anti-EGFR | YIYYSGSTDYNPSLKSRVTMSVDTSKNQFSLKVNSVTAADTAVYYCARVSI |
| antibody | FGVGTFDYWGQGTLVTVSSASTKGPSVLPLAPSSKSTSGGTAALGCLVKDY |
| (necitumumab) - | FPEPVTVSWNSGALTSGVHTFPAVLQSSGLYSLSSVVTVPSSSLGTQTYICN |
| heavy chain | VNHKPSNTKVDKRVEPKSCDKTHTCPPCPAPELLGGPSVFLFPPKPKDTLMI |
| | SRTPEVTCVVVDVSHEDPEVKFNWYVDGVEVHNAKTKPREEQYNSTYRV |
| | VSVLTVLHQDWLNGKEYKCKVSNKALPAPIEKTISKAKGQPREPQVYTLPP |
| | SREEMTKNQVSLTCLVKGFYPSDIAVEWESNGQPENNYKTTPPVLDSDGSF |
| | FLYSKLTVDKSRWQQGNVFSCSVMHEALHNHYTQKSLSLSPGK |
| SEQ ID NO: 39 | EIVMTQSPATLSLSPGERATLSCRASQSVSSYLAWYQQKPGQAPRLLIYDAS |
| anti-EGFR | NRATGIPARFSGSGSGTDFTLTISSLEPEDFAVYYCHQYGSTPLTFGGGTKA |
| antibody | EIKRTVAAPSVFIFPPSDEQLKSGTASVVCLLNNFYPREAKVQWKVDNALQ |
| (necitumumab) - | SGNSQESVTEQDSKDSTYSLSSTLTLSKADYEKHKVYACEVTHQGLSSPVT |
| light chain | KSFNRGEC |
| SEQ ID NO: 40 | EVQLQESGPGLVKPSQTLSLTCTVSGYSISNDFAWNWIRQLPGKGLEWMG |
| anti-EGFR | YISYKGNTRYQPSLKSRITISRDTSKNQFFLKLNSVTAADTATYYCVTASRG |
| antibody (ABBV- | LPYWGQGTLVTVSSASTKGPSVFPLAPSSKSTSGGTAALGCLVKDYFPEPV |
| 321) - heavy chain | TVSWNSGALTSGVHTFPAVLQSSGLYSLSSVVTVPSSSLGTQTYICNVNHKP |
| | SNTKVDKKVEPKSCDKTHTCPPCPAPELLGGPSVFLFPPKPKDTLMISRTPE |
| | VTCVVVDVSHEDPEVKFNWYVDGVEVHNAKTKPREEQYNSTYRVVSVLT |
| | VLHQDWLNGKEYKCKVSNKALPAPIEKTISKAKGQPREPQVYTLPPSREEM |
| | TKNQVSLTCLVKGFYPSDIAVEWESNGQPENNYKTTPPVLDSDGSFFLYSK |
| | LTVDKSRWQQGNVFSCSVMHEALHNHYTQKSLSLSPGK |
| SEQ ID NO: 41 | DIQMTQSPSSMSVSVGDRVTITCHSSQDITYNIGWLQQKPGKSFKGLIYHGA |
| anti-EGFR | NLDDGVPSRFSGSGSGTDYTLTISSLQPEDFATYYCVQYDEFPWTFGGGTK |
| antibody (ABBV- | LEIKRTVAAPSVFIFPPSDEQLKSGTASVVCLLNNFYPREAKVQWKVDNAL |
| 321) - light chain | QSGNSQESVTEQDSKDSTYSLSSTLTLSKADYEKHKVYACEVTHQGLSSPV |
| | TKSFNRGEC |
| SEQ ID NO: 42 | QVQLKQSGPGLVQPSQSLSITCTVSGFSLTNYGVHWVRQSPGKGLEWLGVI |
| anti-EGFR | WSGGNTDYNTPFTSRLSINKDNSKSQVFFKMNSLQSNDTAIYYCARALTYY |
| antibody | DYEFAYWGQGTLVTVSAASTKGPSVFPLAPSSKSTSGGTAALGCLVKDYFP |
| (cetuximab) - | EPVTVSWNSGALTSGVHTFYAVLQSSGLYSLSSVVTVPSSSLGTQTYICNVN |
| heavy chain | HKPSNTKVDKRVEPKSCDKTHTCPPCPAPELLGGPSVFLFPPKPKDTLMISR |
| | TPEVTCVVVDVSHEDPEVKFNWYVDGVEVHNAKTKPREEQYNSTYRVVS |
| | VLTVLHQDWLNGKEYKCKVSNKALPAPIEKTISKAKGQPREPQVYTLPPSR |
| | DELTKNQVSLTCLVKGFYPSDIAVEWESNGQPENNYKTTPPVLDSDGSFFL |
| | YSKLTVDKSRWQQGNVFSCSVMHEALHNHYTQKSLSLSPGK |
| SEQ ID NO: 43 | DILLTQSPVILSVSPGERVSFSCRASQSIGTNIHWYQQRTNGSPRLLIKYASES |
| anti-EGFR | ISGIPSRFSGSGSGTDFTLSINSVESEDIADYYCQQNNNWPTTFGAGTKLELK |
| antibody | RTVAAPSVFIFPPSDEQLKSGTASVVCLLNNFYPREAKVQWKVDNALQSGN |
| (cetuximab) - light | SQESVTEQDSKDSTYSLSSTLTLSKADYEKHKVYACEVTHQGLSSPVTKSF |
| chain | NRGEC |
| SEQ ID NO: 44 | DVQLQESGPGLVKPSQSLSLTCTVTAYSVTSDYAWNWIRQFPGNKLEWMG |
| anti-EGFRvIII | YISYSGTTRYNPSLKSRISITRDTSKNQFFLQLNSMTAEDTATYYCSRQGRG |
| antibody (ab1) - | FPYWGQGTLVTVSAASTKGPSVFPLAPSSKSTSGGTAALGCLVKDYFPEPV |
| heavy chain | TVSWNSGALTSGVHTFPAVLQSSGLYSLSSVVTVPSSSLGTQTYICNVNHKP |
| | SNTKVDKKVEPKSCDKTHTCPPCPAPELLGGPSVFLFPPKPKDTLMISRTPE |
| | VTCVVVDVSHEDPEVKFNWYVDGVEVHNAKTKPREEQYNSTYRVVSVLT |
| | VLHQDWLNGKEYKCKVSNKALPAPIEKTISKAKGQPREPQVYTLPPSREEM |
| | TKNQVSLTCLVKGFYPSDIAVEWESNGQPENNYKTTPPVLDSDGSFFLYSK |
| | LTVDKSRWQQGNVFSCSVMHEALHNHYTQKSLSLSPGK |
| SEQ ID NO: 45 | DILMTQSPSSMSVSLGDTVSITCHASQDINSNIGWLQQKPGKSFKGLIYHGT |
| anti-EGFRvIII | NLEDGVPSRFSGSGSGADYSLTISSLESEDFADYYCVQYAQFPWTFGGGTK |
| antibody (ab1) - | LEIKRTVAAPSVFIFPPSDEQLKSGTASVVCLLNNFYPREAKVQWKVDNAL |
| light chain | QSGNSQESVTEQDSKDSTYSLSSTLTLSKADYEKHKVYACEVTHQGLSSPV |
| | TKSFNRGEC |
| SEQ ID NO: 46 | QVQLQESGPGLVKPSQTLSLTCTVSGYSISSDFAWNWIRQPPGKGLEWMG |
| anti-EGFRvIII | YISYSGNTRYQPSLKSRITISRDTSKNQFFLKLNSVTAADTATYYCVTAGRG |
| antibody | FPYWGQGTLVTVSSASTKGPSVFPLAPSSKSTSGGTAALGCLVKDYFPEPV |
| (depatuxizumab) - | TVSWNSGALTSGVHTFPAVLQSSGLYSLSSVVTVPSSSLGTQTYICNVNHKP |
| heavy chain | SNTKVDKKVEPKSCDKTHTCPPCPAPELLGGPSVFLFPPKPKDTLMISRTPE |
| | VTCVVVDVSHEDPEVKFNWYVDGVEVHNAKTKPREEQYNSTYRVVSVLT |
| | VLHQDWLNGKEYKCKVSNKALPAPIEKTISKAKGQPREPQVYTLPPSRDEL |
| | TKNQVSLTCLVKGFYPSDIAVEWESNGQPENNYKTTPPVLDSDGSFFLYSK |
| | LTVDKSRWQQGNVFSCSVMHEALHNHYTQKSLSLSPGK |
| SEQ ID NO: 47 | DIQMTQSPSSMSVSVGDRVTITCHSSQDINSNIGWLQQKPGKSFKGLIYHGT |
| anti-EGFRvIII | NLDDGVPSRFSGSGSGTDYTLTISSLQPEDFATYYCVQYAQFPWTFGGGTK |
| antibody | LEIKRTVAAPSVFIFPPSDEQLKSGTASVVCLLNNFYPREAKVQWKVDNAL |
| (depatuxizumab) - | QSGNSQESVTEQDSKDSTYSLSSTLTLSKADYEKHKVYACEVTHQGLSSPV |
| light chain | TKSFNRGEC |
| SEQ ID NO: 48 | QVQLVQPGAEVRKPGASVKVSCKASGYRFTSYYIDWVRQAPGQGLEWMG |
| anti-GARP | RIDPEDAGTKYAQKFQGRVTMTADTSTSTVYVELSSLRSEDTAVYYCARY |
| antibody (ARGX- | EWETVVVGDLMYEYEYWGQGTLVTVSSASTKGPSVFPLAPCSRSTSESTA |
| 115) - heavy chain | ALGCLVKDYFPEPVTVSWNSGALTSGVHTFPAVLQSSGLYSLSSVVTVPSS |
| | SLGTKTYTCNVDHKPSNTKVDKRVESKYGPPCPPCPAPEFLGGPSVFLFPPK |
| | PKDTLMISRTPEVTCVVVDVSQEDPEVQFNWYVDGVEVHNAKTKPREEQF |
| | NSTYRVVSVLTVLHQDWLNGKEYKCKVSNKGLPSSIEKTISKAKGQPREPQ |
| | VYTLPPSQEEMTKNQVSLTCLVKGFYPSDIAVEWESNGQPENNYKTTPPVL |
| | DSDGSFFLYSRLTVDKSRWQEGNVFSCSVMHEALHNHYTQKSLSLSLG |
| SEQ ID NO: 49 | DIQMTQSPSSLSASVGDRVTITCQASQSISSYLAWYQQKPGQAPKILIYGAS |
| anti-GARP | RLKTGVPSRFSGSGSGTSFTLTISSLEPEDAATYYCQQYASVPVTFGQGTKV |
| antibody (ARGX- | EIKRTVAAPSVFIFPPSDEQLKSGTASVVCLLNNFYPREAKVQWKVDNALQ |
| 115) - light chain | SGNSQESVTEQDSKDSTYSLSSTLTLSKADYEKHKVYACEVTHQGLSSPVT |
| | KSFNRGEC |
| SEQ ID NO: 50 | EVQLLQSGPELEKPGASVMISCKASGSSFTGYNMNWVRQNIGKSLEWIGAI |
| anti-GD2 | DPYYGGTSYNQKFKGRATLTVDKSSSTAYMHLKSLTSEDSAVYYCVSGME |
| antibody | YWGQGTSVTVSSASTKGPSVFPLAPSSKSTSGGTAALGCLVKDYFPEPVTV |
| (dinutuximab) - | SWNSGALTSGVHTFPAVLQSSGLYSLSSVVTVPSSSLGTQTYICNVNHKPSN |
| heavy chain | TKVDKRVEPKSCDKTHTCPPCPAPELLGGPSVFLFPPKPKDTLMISRTPEVT |
| | CVVVDVSHEDPEVKFNWYVDGVEVHNAKTKPREEQYNSTYRVVSVLTVL |
| | HQDWLNGKEYKCKVSNKALPAPIEKTISKAKGQPREPQVYTLPPSREEMTK |
| | NQVSLTCLVKGFYPSDIAVEWESNGQPENNYKTTPPVLDSDGSFFLYSKLT |
| | VDKSRWQQGNVFSCSVMHEALHNHYTQKSLSLSPGK |
| | EIVMTQSPATLSVSPGERATLSCRSSQSLVHRNGNTYLHWYLQKPGQSPKL |
| SEQ ID NO: 51 | LIHKVSNRFSGVPDRFSGSGSGTDFTLKISRVEAEDLGVYFCSQSTHVPPLTF |
| anti-GD2 | GAGTKLELKRTVAAPSVFIFPPSDEQLKSGTASVVCLLNNFYPREAKVQWK |
| antibody | VDNALQSGNSQESVTEQDSKDSTYSLSSTLTLSKADYEKHKVYACEVTHQ |
| (dinutuximab) - | GLSSPVTKSFNRGEC |
| light chain | |
| SEQ ID NO: 52 | EVQLVESGGGLVQPGGSLRLSCAASGFTFTDYTMDWVRQAPGKGLEWVA |
| anti-HER2 | DVNPNSGGSIYNQRFKGRFTLSVDRSKNTLYLQMNSLRAEDTAVYYCARN |
| antibody | LGPSFYFDYWGQGTLVTVSSASTKGPSVFPLAPSSKSTSGGTAALGCLVKD |
| (pertuzumab) - | YFPEPVTVSWNSGALTSGVHTFPAVLQSSGLYSLSSVVTVPSSSLGTQTYIC |
| heavy chain | NVNHKPSNTKVDKKVEPKSCDKTHTCPPCPAPELLGGPSVFLFPPKPKDTL |
| | MISRTPEVTCVVVDVSHEDPEVKFNWYVDGVEVHNAKTKPREEQYNSTYR |
| | VVSVLTVLHQDWLNGKEYKCKVSNKALPAPIEKTISKAKGQPREPQVYTLP |
| | PSREEMTKNQVSLTCLVKGFYPSDIAVEWESNGQPENNYKTTPPVLDSDGS |
| | FFLYSKLTVDKSRWQQGNVFSCSVMHEALHNHYTQKSLSLSPG |
| SEQ ID NO: 53 | DIQMTQSPSSLSASVGDRVTITCKASQDVSIGVAWYQQKPGKAPKLLIYSAS |
| anti-HER2 | YRYTGVPSRFSGSGSGTDFTLTISSLQPEDFATYYCQQYYIYPYTFGQGTKV |
| antibody | EIKRTVAAPSVFIFPPSDEQLKSGTASVVCLLNNFYPREAKVQWKVDNALQ |
| (pertuzumab) - | SGNSQESVTEQDSKDSTYSLSSTLTLSKADYEKHKVYACEVTHQGLSSPVT |
| light chain | KSFNRGEC |
| SEQ ID NO: 54 | EVQLVESGGGLVQPGGSLRLSCAASGFNIKDTYIHWVRQAPGKGLEWVAR |
| anti-HER2 | IYPTNGYTRYADSVKGRFTISADTSKNTAYLQMNSLRAEDTAVYYCSRWG |
| antibody | GDGFYAMDYWGQGTLVTVSSASTKGPSVFPLAPSSKSTSGGTAALGCLVK |
| (trastuzumab) - | DYFPEPVTVSWNSGALTSGVHTFPAVLQSSGLYSLSSVVTVPSSSLGTQTYI |
| heavy chain | CNVNHKPSNTKVDKKVEPKSCDKTHTCPPCPAPELLGGPSVFLFPPKPKDT |
| | LMISRTPEVTCVVVDVSHEDPEVKFNWYVDGVEVHNAKTKPREEQYNSTY |
| | RVVSVLTVLHQDWLNGKEYKCKVSNKALPAPIEKTISKAKGQPREPQVYT |
| | LPPSREEMTKNQVSLTCLVKGFYPSDIAVEWESNGQPENNYKTTPPVLDSD |
| | GSFFLYSKLTVDKSRWQQGNVFSCSVMHEALHNHYTQKSLSLSPGK |
| SEQ ID NO: 55 | DIQMTQSPSSLSASVGDRVTITCRASQDVNTAVAWYQQKPGKAPKLLIYSA |
| anti-HER2 | SFLYSGVPSRFSGSRSGTDFTLTISSLQPEDFATYYCQQHYTTPPTFGQGTKV |
| antibody | EIKRTVAAPSVFIFPPSDEQLKSGTASVVCLLNNFYPREAKVQWKVDNALQ |
| (trastuzumab) - | SGNSQESVTEQDSKDSTYSLSSTLTLSKADYEKHKVYACEVTHQGLSSPVT |
| light chain | KSFNRGEC |
| SEQ ID NO: 56 | QVQLQESGPGLVKPSETLSLTCTVSGGSISIYYWSWIRQPPGKGLEWIGYVY |
| anti-HGF | YSGSTNYNPSLKSRVTISVDTSKNQFSLKLNSVTAADTAVYYCARGGYDF |
| antibody | WSGYFDYWGQGTLVTVSSASTKGPSVFPLAPCSRSTSESTAALGCLVKDYF |
| (rilotumumab) - | PEPVTVSWNSGALTSGVHTFYAVLQSSGLYSLSSVVTVPSSNFGTQTYTCN |
| heavy chain | VDHKPSNTKVDKTVERKCCVECPPCPAPPVAGPSVFLFPPKPKDTLMISRTP |
| | EVTCVVVDVSHEDPEVQFNWYVDGVEVHNAKTKPREEQFNSTFRVVSVLT |
| | VVHQDWLNGKEYKCKVSNKGLPAPIEKTISKTKGQPREPQVYTLPPSREEM |
| | TKNQVSLTCLVKGFYPSDIAVEWESNGQPENNYKTTPPMLDSDGSFFLYSK |
| | LTVDKSRWQQGNVFSCSVMHEALHNHYTQKSLSLSPGK |
| SEQ ID NO: 57 | EIVMTQSPATLSVSPGERATLSCRASQSVDSNLAWYRQKPGQAPRLLIYGA |
| anti-HGF | STRATGIPARFSGSGSGTEFTLTISSLQSEDFAVYYCQQYINWPPITFGQGTR |
| antibody | LEIKRTVAAPSVFIFPPSDEQLKSGTASVVCLLNNFYPREAKVQWKVDNAL |
| (rilotumumab) - | QSGNSQESVTEQDSKDSTYSLSSTLTLSKADYEKHKVYACEVTHQGLSSPV |
| light chain | TKSFNRGEC |
| SEQ ID NO: 58 | QVQLVQSGAEVKKPGSSVKVSCKASGYTFTDYAMHWVRQAPGQGLEWM |
| anti-ICOS | GLISTYSDHTNYNQKFQGRVTITADKSTSTAYMELSSLRSEDTAVYYCGRN |
| antibody | NYGNYGWYFDVWGQGTTVTVSS |
| (GSK3359609) - | |
| heavy chain | |
| SEQ ID NO: 59 | EIVLTQSPATLSLSPGERATLSCSASSSVSYMHWYQQKPGQAPRLLIYDTSK |
| anti-ICOS | LASGIPARFSGSGSGTDYTLTISSLEPEDFAVYYCFQGSGYPYTFGOGTKLEI |
| antibody | KRTVAAPSVFIFPPSDEQLKSGTASVVCLLNNFYPREAKVQWKVDNALQSG |
| (G5K3359609) - | NSQESVTEQDSKDSTYSLSSTLTLSKADYEKHKVYACEVTHQGLSSPVTKS |
| light chain | FNRGEC |
| SEQ ID NO: 60 | QVQLQQPGAELVRPGASVKLSCKASGYTFSNYLMNWVKQRPEQDLDWIG |
| anti-IL13Ra2 | RIDPYDGDIDYNQNFKDKAILTVDKSSSTAYMQLSSLTSEDSAVYYCARGY |
| antibody (ab1) - | GTAYGVDYWGQGTSVTVSSASTKGPSVFPLAPSSKSTSGGTAALGCLVKD |
| heavy chain | YFPEPVTVSWNSGALTSGVHTFPAVLQSSGLYSLSSVVTVPSSSLGTQTYIC |
| | NVNHKPSNTKVDKKVEPKSCDKTHTCPPCPAPELLGGPSVFLFPPKPKDTL |
| | MISRTPEVTCVVVDVSHEDPEVKFNWYVDGVEVHNAKTKPREEQYNSTYR |
| | VVSVLTVLHQDWLNGKEYKCKVSNKALPAPIEKTISKAKGQPREPQVYTLP |
| | PSREEMTKNQVSLTCLVKGFYPSDIAVEWESNGQPENNYKTTPPVLDSDGS |
| | FFLYSKLTVDKSRWQQGNVFSCSVMHEALHNHYTQKSLSLSPGK |
| SEQ ID NO: 61 | DIVLTQSPASLAVSLGQRATISCRASESVDNYGISFMNWFQQKPGQPPKLLI |
| anti-IL13Ra2 | YAASRQGSGVPARFSGSGSGTDFSLNIHPMEEDDTAMYFCQQSKEVPWTF |
| antibody (ab1) - | GGGTKLEIKRTVAAPSVFIFPPSDEQLKSGTASVVCLLNNFYPREAKVQWK |
| light chain | VDNALQSGNSQESVTEQDSKDSTYSLSSTLTLSKADYEKHKVYACEVTHQ |
| | GLSSPVTKSFNRGEC |
| SEQ ID NO: 62 | QVQLVQSGAEVKKPGASVKVSCKASGYTFTRYGISWVRQAPGQGLEWMG |
| anti-IL17R | WISTYSGNTNYAQKLQGRVTMTTDTSTSTAYMELRSLRSDDTAVYYCARR |
| antibody | QLYFDYWGQGTLVTVSSASTKGPSVFPLAPCSRSTSESTAALGCLVKDYFP |
| (brodalumab) - | EPVTVSWNSGALTSGVHTFPAVLQSSGLYSLSSVVTVPSSNFGTQTYTCNV |
| heavy chain | DHKPSNTKVDKTVERKCCVECPPCPAPPVAGPSVFLFPPKPKDTLMISRTPE |
| | VTCVVVDVSHEDPEVQFNWYVDGVEVHNAKTKPREEQFNSTFRVVSVLT |
| | VVHQDWLNGKEYKCKVSNKGLPAPIEKTISKTKGQPREPQVYTLPPSREEM |
| | TKNQVSLTCLVKGFYPSDIAVEWESNGQPENNYKTTPPMLDSDGSFFLYSK |
| | LTVDKSRWQQGNVFSCSVMHEALHNHYTQKSLSLSPGK |
| SEQ ID NO: 63 | EIVMTQSPATLSVSPGERATLSCRASQSVSSNLAWFQQKPGQAPRPLIYDAS |
| anti-IL17R | TRATGVPARFSGSGSGTDFTLTISSLQSEDFAVYYCQQYDNWPLTFGGGTK |
| antibody | VEIKRTVAAPSVFIFPPSDEQLKSGTASVVCLLNNFYPREAKVQWKVDNAL |
| (brodalumab) - | QSGNSQESVTEQDSKDSTYSLSSTLTLSKADYEKHKVYACEVTHQGLSSPV |
| light chain | TKSFNRGEC |
| SEQ ID NO: 64 | EVQLVQSGAEVKKPGASVKVSCKASGYTFKYYGMNWVRQAPGQGLERM |
| anti-IL1a | GWINTYTGQSTYADDFKGRVTFTLDTSTSTAYMELSSLRSEDTAVYYCAR |
| antibody | DIYYYGSDFAMDYWGQGTTVTVSSASTKGPSVFPLAPSSKSTSGGTAALGC |
| (3D12r16) - heavy | LVKDYFPEPVTVSWNSGALTSGVHTFPAVLQSSGLYSLSSVVTVPSSSLGTQ |
| chain | TYICNVNHKPSNTKVDKKVEPKSCDKTHTCPPCPAPELLGGPSVFLFPPKPK |
| | DTLMISRTPEVTCVVVDVSHEDPEVKFNWYVDGVEVHNAKTKPREEQYNS |
| | TYRVVSVLTVLHQDWLNGKEYKCKVSNKALPAPIEKTISKAKGQPREPQV |
| | YTLPPSREEMTKNQVSLTCLVKGFYPSDIAVEWESNGQPENNYKTTPPVLD |
| | SDGSFFLYSKLTVDKSRWQQGNVFSCSVMHEALHNHYTQKSLSLSPGK |
| SEQ ID NO: 65 | DIQMTQSPSSLSASVGDRVTITCRASQDISNMLNWYQQKPGKAPKLLIYYT |
| anti-IL1a | SRLKPGVPSRFSGSGSGTDYTFTISSLQPEDIATYFCQQGKTAPYTFGQGTKL |
| antibody | EIKRTVAAPSVFIFPPSDEQLKSGTASVVCLLNNFYPREAKVQWKVDNALQ |
| (3D12r16) - light | SGNSQESVTEQDSKDSTYSLSSTLTLSKADYEKHKVYACEVTHQGLSSPVT |
| chain | KSFNRGEC |
| SEQ ID NO: 66 | EVQLVESGGGVVQPGRSLRLSCSASGFIFSRYDMSWVRQAPGKGLEWVAY |
| anti-IL1b | ISHGGAGTYYPDSVKGRFTISRDNSKNTLFLQMDSLRAEDTAVYYCARGG |
| antibody (E26.35) | VYKGYFDVWGQGTPVTVSSASTKGPSVFPLAPSSKSTSGGTAALGCLVKD |
| - heavy chain | YFPEPVTVSWNSGALTSGVHTFPAVLQSSGLYSLSSVVTVPSSSLGTQTYIC |
| | NVNHKPSNTKVDKKVEPKSCDKTHTCPPCPAPELLGGPSVFLFPPKPKDTL |
| | MISRTPEVTCVVVDVSHEDPEVKFNWYVDGVEVHNAKTKPREEQYNSTYR |
| | VVSVLTVLHQDWLNGKEYKCKVSNKALPAPIEKTISKAKGQPREPQVYTLP |
| | PSREEMTKNQVSLTCLVKGFYPSDIAVEWESNGQPENNYKTTPPVLDSDGS |
| | FFLYSKLTVDKSRWQQGNVFSCSVMHEALHNHYTQKSLSLSPGK |
| SEQ ID NO: 67 | DIQMTQSPSSLSASVGDRVTITCRASGNIHNYLTWYQQTPGKAPKLLIYNA |
| anti-IL1b | KTLADGVPSRFSGSGSGTDYTFTISSLQPEDIATYYCQHFWSIPYTFGQGTK |
| antibody (E26.35) | LQITRTVAAPSVFIFPPSDEQLKSGTASVVCLLNNFYPREAKVQWKVDNAL |
| - light chain | QSGNSQESVTEQDSKDSTYSLSSTLTLSKADYEKHKVYACEVTHQGLSSPV |
| | TKSFNRGEC |
| SEQ ID NO: 68 | QVQLVESGGGVVQPGRSLRLSCAASGFTFSVYGMNWVRQAPGKGLEWVA |
| anti-IL1b | IIWYDGDNQYYADSVKGRFTISRDNSKNTLYLQMNGLRAEDTAVYYCARD |
| antibody | LRTGPFDYWGQGTLVTVSSASTKGPSVFPLAPSSKSTSGGTAALGCLVKDY |
| (canakinumab) - | FPEPVTVSWNSGALTSGVHTFPAVLQSSGLYSLSSVVTVPSSSLGTQTYICN |
| heavy chain | VNHKPSNTKVDKRVEPKSCDKTHTCPPCPAPELLGGPSVFLFPPKPKDTLMI |
| | SRTPEVTCVVVDVSHEDPEVKFNWYVDGVEVHNAKTKPREEQYNSTYRV |
| | VSVLTVLHQDWLNGKEYKCKVSNKALPAPIEKTISKAKGQPREPQVYTLPP |
| | SREEMTKNQVSLTCLVKGFYPSDIAVEWESNGQPENNYKTTPPVLDSDGSF |
| | FLYSKLTVDKSRWQQGNVFSCSVMHEALHNHYTQKSLSLSPGK |
| SEQ ID NO: 69 | EIVLTQSPDFQSVTPKEKVTITCRASQSIGSSLHWYQQKPDQSPKLLIKYASQ |
| anti-IL1b | SFSGVPSRFSGSGSGTDFTLTINSLEAEDAAAYYCHQSSSLPFTFGPGTKVDI |
| antibody | KRTVAAPSVFIFPPSDEQLKSGTASVVCLLNNFYPREAKVQWKVDNALQSG |
| (canakinumab) - | NSQESVTEQDSKDSTYSLSSTLTLSKADYEKHKVYACEVTHQGLSSPVTKS |
| light chain | FNRGEC |
| SEQ ID NO: 70 | QVQLVESGGGVVQPGRSLRLSCAASGFTFSSYGMHWVRQAPGKGLEWVA |
| anti-IL23 | VIWYDGSNEYYADSVKGRFTISRDNSKNTLYLQMNSLRAEDTAVYYCARD |
| antibody | RGYTSSWYPDAFDIWGQGTMVTVSSASTKGPSVFPLAPCSRSTSESTAALG |
| (brazikumab) - | CLVKDYFPEPVTVSWNSGALTSGVHTFPAVLQSSGLYSLSSVVTVPSSNFG |
| heavy chain | TQTYTCNVDHKPSNTKVDKTVERKCCVECPPCPAPPVAGPSVFLFPPKPKD |
| | TLMISRTPEVTCVVVDVSHEDPEVQFNWYVDGVEVHNAKTKPREEQFNST |
| | FRVVSVLTVVHQDWLNGKEYKCKVSNKGLPAPIEKTISKTKGQPREPQVY |
| | TLPPSREEMTKNQVSLTCLVKGFYPSDIAVEWESNGQPENNYKTTPPMLDS |
| | DGSFFLYSKLTVDKSRWQQGNVFSCSVMHEALHNHYTQKSLSLSPGK |
| SEQ ID NO: 71 | QSVLTQPPSVSGAPGQRVTISCTGSSSNTGAGYDVHWYQQVPGTAPKLLIY |
| anti-IL23 | GSGNRPSGVPDRFSGSKSGTSASLAITGLQAEDEADYYCQSYDSSLSGWVF |
| antibody | GGGTRLTVLGQPKAAPSVTLFPPSSEELQANKATLVCLISDFYPGAVTVAW |
| (brazikumab) - | KADSSPVKAGVETTTPSKQSNNKYAASSYLSLTPEQWKSHRSYSCQVTHE |
| light chain | GSTVEKTVAPTECS |
| SEQ ID NO: 72 | EVQLVQSGAEVKKPGESLKISCKGSGYSFSNYWIGWVRQMPGKGLEWMGI |
| anti-IL23 | IDPSNSYTRYSPSFQGQVTISADKSISTAYLQWSSLKASDTAMYYCARWYY |
| antibody | KPFDVWGQGTLVTVSSASTKGPSVFPLAPSSKSTSGGTAALGCLVKDYFPE |
| (guselkumab) - | PVTVSWNSGALTSGVHTFPAVLQSSGLYSLSSVVTVPSSSLGTQTYICNVNH |
| heavy chain | KPSNTKVDKKVEPKSCDKTHTCPPCPAPELLGGPSVFLFPPKPKDTLMISRT |
| | PEVTCVVVDVSHEDPEVKFNWYVDGVEVHNAKTKPREEQYNSTYRVVSV |
| | LTVLHQDWLNGKEYKCKVSNKALPAPIEKTISKAKGQPREPQVYTLPPSRD |
| | ELTKNQVSLTCLVKGFYPSDIAVEWESNGQPENNYKTTPPVLDSDGSFFLY |
| | SKLTVDKSRWQQGNVFSCSVMHEALHNHYTQKSLSLSPGK |
| SEQ ID NO: 73 | QSVLTQPPSVSGAPGQRVTISCTGSSSNIGSGYDVHWYQQLPGTAPKLLIYG |
| anti-IL23 | NSKRPSGVPDRFSGSKSGTSASLAITGLQSEDEADYYCASWTDGLSLVVFG |
| antibody | GGTKLTVLGQPKAAPSVTLFPPSSEELQANKATLVCLISDFYPGAVTVAWK |
| (guselkumab) - | ADSSPVKAGVETTTPSKQSNNKYAASSYLSLTPEQWKSHRSYSCQVTHEGS |
| light chain | TVEKTVAPTECS |
| SEQ ID NO: 74 | QVQLVQSGAEVKKPGSSVKVSCKASGYTFTDQTIHWMRQAPGQGLEWIG |
| anti-IL23 | YIYPRDDSPKYNENFKGKVTITADKSTSTAYMELSSLRSEDTAVYYCAIPDR |
| antibody | SGYAWFIYWGQGTLVTVSSASTKGPSVFPLAPSSKSTSGGTAALGCLVKDY |
| (risankizumab) - | FPEPVTVSWNSGALTSGVHTFPAVLQSSGLYSLSSVVTVPSSSLGTQTYICN |
| heavy chain | VNHKPSNTKVDKRVEPKSCDKTHTCPPCPAPEAAGGPSVFLFPPKPKDTLM |
| | ISRTPEVTCVVVDVSHEDPEVKFNWYVDGVEVHNAKTKPREEQYNSTYRV |
| | VSVLTVLHQDWLNGKEYKCKVSNKALPAPIEKTISKAKGQPREPQVYTLPP |
| | SREEMTKNQVSLTCLVKGFYPSDIAVEWESNGQPENNYKTTPPVLDSDGSF |
| | FLYSKLTVDKSRWQQGNVFSCSVMHEALHNHYTQKSLSLSPG |
| SEQ ID NO: 75 | DIQMTQSPSSLSASVGDRVTITCKASRDVAIAVAWYQQKPGKVPKLLIYWA |
| anti-IL23 | STRHTGVPSRFSGSGSRTDFTLTISSLQPEDVADYFCHQYSSYPFTFGSGTKL |
| antibody | EIKRTVAAPSVFIFPPSDEQLKSGTASVVCLLNNFYPREAKVQWKVDNALQ |
| (risankizumab) - | SGNSQESVTEQDSKDSTYSLSSTLTLSKADYEKHKVYACEVTHQGLSSPVT |
| light chain | KSFNRGEC |
| SEQ ID NO: 76 | QVQLVQSGAEVKKPGASVKVSCKASGYIFITYWMTWVRQAPGQGLEWM |
| anti-IL23 | GQIFPASGSADYNEKFEGRVTMTTDTSTSTAYMELRSLRSDDTAVYYCAR |
| antibody | GGGGFAYWGQGTLVTVSSASTKGPSVFPLAPSSKSTSGGTAALGCLVKDY |
| (tildrakizumab) - | FPEPVTVSWNSGALTSGVHTFPAVLQSSGLYSLSSVVTVPSSSLGTQTYICN |
| heavy chain | VNHKPSNTKVDKRVEPKSCDKTHTCPPCPAPEAAGGPSVFLFPPKPKDTLM |
| | ISRTPEVTCVVVDVSHEDPEVKFNWYVDGVEVHNAKTKPREEQYNSTYRV |
| | VSVLTVLHQDWLNGKEYKCKVSNKALPAPIEKTISKAKGQPREPQVYTLPP |
| | SREEMTKNQVSLTCLVKGFYPSDIAVEWESNGQPENNYKTTPPVLDSDGSF |
| | FLYSKLTVDKSRWQQGNVFSCSVMHEALHNHYTQKSLSLSPGK |
| SEQ ID NO: 77 | DIQMTQSPSSLSASVGDRVTITCRTSENIYSYLAWYQQKPGKAPKLLIYNAK |
| anti-IL23 | TLAEGVPSRFSGSGSGTDFTLTISSLQPEDFATYYCQHHYGIPFTFGQGTKVE |
| antibody | IKRTVAAPSVFIFPPSDEQLKSGTASVVCLLNNFYPREAKVQWKVDNALQS |
| (tildrakizumab) - | GNSQESVTEQDSKDSTYSLSSTLTLSKADYEKHKVYACEVTHQGLSSPVTK |
| light chain | SFNRGEC |
| SEQ ID NO: 78 | QVQLQESGPGLVRPSQTLSLTCTVSGYSITSDHAWSWVRQPPGRGLEWIGY |
| anti-IL6R | ISYSGITTYNPSLKSRVTMLRDTSKNQFSLRLSSVTAADTAVYYCARSLART |
| antibody | TAMDYWGQGSLVTVSSASTKGPSVFPLAPSSKSTSGGTAALGCLVKDYFPE |
| (tocilizumab) - | PVTVSWNSGALTSGVHTFPAVLQSSGLYSLSSVVTVPSSSLGTQTYICNVNH |
| heavy chain | KPSNTKVDKKVEPKSCDKTHTCPPCPAPELLGGPSVFLFPPKPKDTLMISRT |
| | PEVTCVVVDVSHEDPEVKFNWYVDGVEVHNAKTKPREEQYNSTYRVVSV |
| | LTVLHQDWLNGKEYKCKVSNKALPAPIEKTISKAKGQPREPQVYTLPPSRD |
| | ELTKNQVSLTCLVKGFYPSDIAVEWESNGQPENNYKTTPPVLDSDGSFFLY |
| | SKLTVDKSRWQQGNVFSCSVMHEALHNHYTQKSLSLSPGK |
| SEQ ID NO: 79 | DIQMTQSPSSLSASVGDRVTITCRASQDISSYLNWYQQKPGKAPKLLIYYTS |
| anti-IL6R | RLHSGVPSRFSGSGSGTDFTFTISSLQPEDIATYYCQQGNTLPYTFGQGTKV |
| antibody | EIKRTVAAPSVFIFPPSDEQLKSGTASVVCLLNNFYPREAKVQWKVDNALQ |
| (tocilizumab) - | SGNSQESVTEQDSKDSTYSLSSTLTLSKADYEKHKVYACEVTHQGLSSPVT |
| light chain | KSFNRGEC |
| SEQ ID NO: 80 | DVQLQESGPGLVKPSQSLSLTCSVTGYSITSGYYWNWIRQFPGNKLEWMG |
| anti-LAP | YISYDGTNNYNPSLKNRISITRDTSKHQFFLKLNSVTTEDTATYYCARSFYN |
| antibody (7H4) - | NYFDFWGQGTTLTVSSASTKGPSVFPLAPSSKSTSGGTAALGCLVKDYFPE |
| heavy chain | PVTVSWNSGALTSGVHTFPAVLQSSGLYSLSSVVTVPSSSLGTQTYICNVNH |
| | KPSNTKVDKKVEPKSCDKTHTCPPCPAPELLGGPSVFLFPPKPKDTLMISRT |
| | PEVTCVVVDVSHEDPEVKFNWYVDGVEVHNAKTKPREEQYNSTYRVVSV |
| | LTVLHQDWLNGKEYKCKVSNKALPAPIEKTISKAKGQPREPQVYTLPPSRE |
| | EMTKNQVSLTCLVKGFYPSDIAVEWESNGQPENNYKTTPPVLDSDGSFFLY |
| | SKLTVDKSRWQQGNVFSCSVMHEALHNHYTQKSLSLSPGK |
| SEQ ID NO: 81 | DIQMTOSPSSLSASLGGKVTITCKASODIDKYIAWYQHKPGKGPRLLIHYTS |
| anti-LAP | TLQPGIPSRFSGSGSGRDYSFNISNLEPEDIATYYCLQYDNLRTFGGGTKLEI |
| antibody (7H4) - | KRTVAAPSVFIFPPSDEQLKSGTASVVCLLNNFYPREAKVQWKVDNALQSG |
| light chain | NSQESVTEQDSKDSTYSLSSTLTLSKADYEKHKVYACEVTHQGLSSPVTKS |
| | FNRGEC |
| SEQ ID NO: 82 | QVQLVQSGAEVKKPGASVKVSCKASGLTIEDYYMHWVRQAPGQGLEWM |
| anti-LIV-1 | GWIDPENGDTEYGPKFQGRVTMTRDTSINTAYMELSRLRSDDTAVYYCAV |
| antibody | HNAHYGTWFAYWGQGTLVTVSSASTKGPSVFPLAPSSKSTSGGTAALGCL |
| (ladiratuzumab) - | VKDYFPEPVTVSWNSGALTSGVHTFPAVLQSSGLYSLSSVVTVPSSSLGTQT |
| heavy chain | YICNVNHKPSNTKVDKKVEPKSCDKTHTCPPCPAPELLGGPSVFLFPPKPKD |
| | TLMISRTPEVTCVVVDVSHEDPEVKFNWYVDGVEVHNAKTKPREEQYNST |
| | YRVVSVLTVLHQDWLNGKEYKCKVSNKALPAPIEKTISKAKGQPREPQVY |
| | TLPPSRDELTKNQVSLTCLVKGFYPSDIAVEWESNGQPENNYKTTPPVLDS |
| | DGSFFLYSKLTVDKSRWQQGNVFSCSVMHEALHNHYTQKSLSLSPG |
| SEQ ID NO: 83 | DVVMTQSPLSLPVTLGQPASISCRSSQSLLHSSGNTYLEWYQQRPGQSPRPL |
| anti-LIV-1 | IYKISTRFSGVPDRFSGSGSGTDFTLKISRVEAEDVGVYYCFQGSHVPYTFG |
| antibody | GGTKVEIKRTVAAPSVFIFPPSDEQLKSGTASVVCLLNNFYPREAKVQWKV |
| (ladiratuzumab) - | DNALQSGNSQESVTEQDSKDSTYSLSSTLTLSKADYEKHKVYACEVTHQG |
| light chain | LSSPVTKSFNRGEC |
| SEQ ID NO: 84 | EVQLVQSGAEVKKPGSSVKVSCKASGFTFTDYYIHWVKQAPGQGLEWIGL |
| anti-LRRC15 | VYPYIGGTNYNQKFKGKATLTVDTSTTTAYMEMSSLRSEDTAVYYCARGD |
| an (ABBV- | NKYDAMDYWGQGTTVTVSSASTKGPSVFPLAPSSKSTSGGTAALGCLVKD |
| 085- | YFPEPVTVSWNSGALTSGVHTFPAVLQSSGLYSLSSVVTVPSSSLGTQTYIC |
| huAD208.4.1) - | NVNHKPSNTKVDKKVEPKSCDKTHTCPPCPAPELLGGPSVFLFPPKPKDTL |
| heavy chain | MISRTPEVTCVVVDVSHEDPEVKFNWYVDGVEVHNAKTKPREEQYNSTYR |
| | VVSVLTVLHQDWLNGKEYKCKVSNKALPAPIEKTISKAKGQPREPQVYTLP |
| | PSREEMTKNQVSLTCLVKGFYPSDIAVEWESNGQPENNYKTTPPVLDSDGS |
| SEQ ID NO: 85 | FFLYSKLTVDKSRWQQGNVFSCSVMHEALHNHYTQKSLSLSPGK |
| anti-LRRC15 | DIVLTQSPDSLAVSLGERATINCRASQSVSTSSYSYMHWYQQKPGQPPKLLI |
| an (ABBV- | KYASSLESGVPDRFSGSGSGTDFTLTISSLQAEDVAVYYCEQSWEIRTFGGG |
| 085- | TKVEIKRTVAAPSVFIFPPSDEQLKSGTASVVCLLNNFYPREAKVQWKVDN |
| huAD208.4.1) - | ALQSGNSQESVTEQDSKDSTYSLSSTLTLSKADYEKHKVYACEVTHQGLSS |
| light chain | PVTKSFNRGEC |
| SEQ ID NO: 86 | EVQLVQSGAEVKKPGASVKVSCKASGYKFSSYWIEWVKQAPGQGLEWIG |
| anti-LRRC15 | EILPGSDTTNYNEKFKDRATFTSDTSINTAYMELSRLRSDDTAVYYCARDR |
| antibody (ABBV- | GNYRAWFGYWGQGTLVTVSSASTKGPSVFPLAPSSKSTSGGTAALGCLVK |
| 085-huM25) - | DYFPEPVTVSWNSGALTSGVHTFPAVLQSSGLYSLSSVVTVPSSSLGTQTYI |
| heavy chain | CNVIVHKPSNTKVDKKVEPKSCDKTHTCPPCPAPELLGGPSVFLFPPKPKDT |
| | LMISRTPEVTCVVVDVSHEDPEVKFNWYVDGVEVHNAKTKPREEQYNSTY |
| | RVVSVLTVLHQDWLNGKEYKCKVSNKALPAPIEKTISKAKGQPREPQVYT |
| | LPPSREEMTKNQVSLTCLVKGFYPSDIAVEWESNGQPENNYKTTPPVLDSD |
| | GSFFLYSKLTVDKSRWQQGNVFSCSVMHEALHNHYTQKSLSLSPG |
| SEQ ID NO: 87 | DIQMTQSPSSLSASVGDRVTITCRASQDISNYLNWYQQKPGGAVKFLIYYTS |
| anti-LRRC15 | RLHSGVPSRFSGSGSGTDYTLTISSLQPEDFATYFCQQGEALPWTFGGGTKV |
| antibody (ABBV- | EIKRTVAAPSVFIFPPSDEQLKSGTASVVCLLNNFYPREAKVQWKVDNALQ |
| 085-huM25) - | SGNSQESVTEQDSKDSTYSLSSTLTLSKADYEKHKVYACEVTHQGLSSPVT |
| light chain | KSFNRGEA |
| SEQ ID NO: 88 | QVQLQQSGAEVKKFGASVKVSCEASGYTFPSYVLHWVKQAPGQGLEWIG |
| anti-MUC1 | YINPYNDGTQYNKKFKGKATLTRDTSINTAYMELSRLRSDDTAVYYCARG |
| antibody | FGGSYGFAYWGQGTLVIVSSASTKGPSVFPLAPSSKSTSGGTAALGCLVKD |
| (clivatuzumab) - | YFPEPVTVSWNSGALTSGVHTFPAVLQSSGLYSLSSVVTVPSSSLGTQTYIC |
| heavy chain | NVNHKPSNTKVDKRVEPKSCDKTHTCPPCPAPELLGGPSVFLFPPKPKDTL |
| | MISRTPEVTCVVVDVSHEDPEVKFNWYVDGVEVHNAKTKPRESQYNSTYR |
| | VVSVLTVLHQDWLNGKEYKCKVSNEALPAPIEKTISKAKGQPREPQVYTLP |
| | PSREEMTKNQVSLTCLVKGFYPSDIAVEWESNGQPENNYKTTPPVLDSDGS |
| | FFLYSKLTVDKSRWQQGNVFSCSVNHEALHNHYTQKSLSLSPGK |
| SEQ ID NO: 89 | DIQLTQSPSSLSASVGDRVTMTCSASSSVSSSYLYWYQQKPGKAPKLWIYS |
| anti-MUC1 | TSNLASGVPARFSGSGSGTDFTLTISSLQPEDSASYFCHQWNRYPYTFGGGT |
| antibody | RLEIKRTVAAPSVFIFPPSDEQLKSGTASVVCLLNNFYPREAKVQWKVDNA |
| (clivatuzumab) - | LQSGNSQESVTEQDSKDSTYSLSSTLTLSKADYEKHKVYACEVTHQGLSSP |
| light chain | VTKSFNRGEC |
| SEQ ID NO: 90 | EVQLQESGPGLVKPSDTLSLTCAVSGYSIASGYYWNWIRQPPGKGLEWMG |
| anti-OX40 | YISYDGSNNYNPSLGNRITISRDTSKNQVSLKLSSVTAVDTAVYYCVKTLPY |
| antibody (ABBV- | YFDYWGQGTTVTVSSASTKGPSVFPLAPSSKSTSGGTAALGCLVKDYFPEP |
| 368-Hu3726) - | VTVSWNSGALTSGVHTFPAVLQSSGLYSLSSVVTVPSSSLGTQTYICNVNH |
| heavy chain | KPSNTKVDKKVEPKSCDKTHTCPPCPAPELLGGPSVFLFPPKPKDTLMISRT |
| | PEVTCVVVDVSHEDPEVKFNWYVDGVEVHNAKTKPREEQYNSTYRVVSV |
| | LTVLHQDWLNGKEYKCKVSNKALPAPIEKTISKAKGQPREPQVYTLPPSRE |
| | EMTKNQVSLTCLVKGFYPSDIAVEWESNGQPENNYKTTPPVLDSDGSFFLY |
| | SKLTVDKSRWQQGNVFSCSVMHEALHNHYTQKSLSLSPGK |
| SEQ ID NO: 91 | DIQMTQTPSSLSASVGDRVTITCRASQDISNYLNWYQQKPGKAPKLLIFYTS |
| anti-OX40 | RLHSGVPSRFSGSGSGTDYTLTISSLQPEDFATYYCQQGNTLPLTFGQGTKL |
| antibody (ABBV- | EIKRTVAAPSVFIFPPSDEQLKSGTASVVCLLNNFYPREAKVQWKVDNALQ |
| 368-Hu3726) - | SGNSQESVTEQDSKDSTYSLSSTLTLSKADYEKHKVYACEVTHQGLSSPVT |
| light chain | KSFNRGEC |
| | EVQLVQSGAEVKKPGSSVKVSCKASGFNIKDTYMHWVRQAPGQGLEWIG |
| SEQ ID NO: 92 | RIDPANGNTKYDPKFQGRATITADTSTNTAYMELSSLRSEDTAVYYCARGG |
| anti-OX40 | PAWFVYWGQGTLVTVSSASTKGPSVFPLAPSSKSTSGGTAALGCLVKDYFP |
| antibody (ABBV- | EPVTVSWNSGALTSGVHTFPAVLQSSGLYSLSSVVTVPSSSLGTQTYICNVN |
| 368-Hu3739) - | HKPSNTKVDKKVEPKSCDKTHTCPPCPAPELLGGPSVFLFPPKPKDTLMISR |
| heavy chain | TPEVTCVVVDVSHEDPEVKFNWYVDGVEVHNAKTKPREEQYNSTYRVVS |
| | VLTVLHQDWLNGKEYKCKVSNKALPAPIEKTISKAKGQPREPQVYTLPPSR |
| | EEMTKNQVSLTCLVKGFYPSDIAVEWESNGQPENNYKTTPPVLDSDGSFFL |
| | YSKLTVDKSRWQQGNVFSCSVMHEALHNHYTQKSLSLSPGK |
| SEQ ID NO: 93 | DIQMTQSPSSLSASVGDRVTITCRASQDISNYLNWYQQKPGKAPKLLIYYTS |
| anti-OX40 | RLRSGLPSRFSGSGSGTDYTLTISSLQPEDFATYYCQQGNTLPWTFGGGTKV |
| antibody (ABBV- | EIKRTVAAPSVFIFPPSDEQLKSGTASVVCLLNNFYPREAKVQWKVDNALQ |
| 368-Hu3739) - | SGNSQESVTEQDSKDSTYSLSSTLTLSKADYEKHKVYACEVTHQGLSSPVT |
| light chain | KSFNRGEC |
| SEQ ID NO: 94 | EVQLVESGGGLVQPGGSLRLSCAVSGFSLTSYGVHWVRQAPGKGLEWLG |
| anti-OX40 | VIWSGGSTDYNAAFISRLTISKDNSKSTVYLQMNSLRAEDTAVYYCAREEF |
| antibody (ABBV- | DYWGQGTTVTVSSASTKGPSVFPLAPSSKSTSGGTAALGCLVKDYFPEPVT |
| 368-Hu3741) - | VSWNSGALTSGVHTFPAVLQSSGLYSLSSVVTVPSSSLGTQTYICNVNHKPS |
| heavy chain | NTKVDKKVEPKSCDKTHTCPPCPAPELLGGPSVFLFPPKPKDTLMISRTPEV |
| | TCVVVDVSHEDPEVKFNWYVDGVEVHNAKTKPREEQYNSTYRVVSVLTV |
| | LHQDWLNGKEYKCKVSNKALPAPIEKTISKAKGQPREPQVYTLPPSREEMT |
| | KNQVSLTCLVKGFYPSDIAVEWESNGQPENNYKTTPPVLDSDGSFFLYSKL |
| | TVDKSRWQQGNVFSCSVMHEALHNHYTQKSLSLSPGK |
| SEQ ID NO: 95 | DIQMTQSPSSLSASVGDRVTITCRASQDISNYLNWFQQKPGKAPKLLIYYTS |
| anti-OX40 | RLHSGVPSRFSGSGSGTDYTLTISSLQPEDFATYYCQQGYTLPPTFGGGTKV |
| antibody (ABBV- | EIKRTVAAPSVFIFPPSDEQLKSGTASVVCLLNNFYPREAKVQWKVDNALQ |
| 368-Hu3741) - | SGNSQESVTEQDSKDSTYSLSSTLTLSKADYEKHKVYACEVTHQGLSSPVT |
| light chain | KSFNRGEC |
| SEQ ID NO: 96 | QVQLVQSGSELKKPGASVKVSCKASGYTFTDYSMHWVRQAPGQGLKWM |
| anti-OX40 | GWINTETGEPTYADDFKGRFVFSLDTSVSTAYLQISSLKAEDTAVYYCANP |
| antibody | YYDYVSYYAMDYWGOGTTVTVSSASTKGPSVFPLAPSSKSTSGGTAALGC |
| (GSK3174998) - | LVKDYFPEPVTVSWNSGALTSGVHTFPAVLQSSGLYSLSSVVTVPSSSLGTQ |
| heavy chain | TYICNVNHKPSNTKVDKKVEPKSCDKTHTCPPCPAPEAAGGPSVFLFPPKP |
| | KDTLMISRTPEVTCVVVDVSHEDPEVKFNWYVDGVEVHNAKTKPREEQY |
| | NSTYRVVSVLTVLHQDWLNGKEYKCKVSNKALPAPIEKTISKAKGQPREP |
| | QVYTLPPSREEMTKNQVSLTCLVKGFYPSDIAVEWESNGQPENNYKTTPPV |
| | LDSDGSFFLYSKLTVDKSRWQQGNVFSCSVMHEALHNHYTQKSLSLSPGK |
| SEQ ID NO: 97 | DIQMTQSPSSLSASVGDRVTITCKASQDVSTAVAWYQQKPGKAPKLLIYSA |
| anti-OX40 | SYLYTGVPSRFSGSGSGTDFTFTISSLQPEDIATYYCOQHYSTPRTFGQGTKL |
| antibody | EIKRTVAAPSVFIFPPSDEQLKSGTASVVCLLNNFYPREAKVQWKVDNALQ |
| (GSK3174998) - | SGNSQESVTEQDSKDSTYSLSSTLTLSKADYEKHKVYACEVTHQGLSSPVT |
| light chain | KSFNRGEC |
| SEQ ID NO: 98 | EVQLVQSGAEVKKPGESLRISCKGSGYTFTTYWMHWVRQATGQGLEWMG |
| anti-PD1 | NIYPGTGGSNFDEKFKNRVTITADKSTSTAYMELSSLRSEDTAVYYCTRWT |
| antibody | TGTGAYWGQGTTVTVSSASTKGPSVFPLAPCSRSTSESTAALGCLVKDYFP |
| (spartalizumab) - | EPVTVSWNSGALTSGVHTFPAVLQSSGLYSLSSVVTVPSSSLGTKTYTCNV |
| heavy chain | DHKPSNTKVDKRVESKYGPPCPPCPAPEFLGGPSVFLFPPKPKDTLMISRTP |
| | EVTCVVVDVSQEDPEVQFNWYVDGVEVHNAKTKPREEQFNSTYRVVSVL |
| | TVLHQDWLNGKEYKCKVSNKGLPSSIEKTISKAKGQPREPQVYTLPPSQEE |
| | MTKNQVSLTCLVKGFYPSDIAVEWESNGQPENNYKTTPPVLDSDGSFFLYS |
| | RLTVDKSRWQEGNVFSCSVMHEALHNHYTQKSLSLSLG |
| SEQ ID NO: 99 | EIVLTQSPATLSLSPGERATLSCKSSQSLLDSGNQKNFLTWYQQKPGQAPRL |
| anti-PD1 | LTYWASTRESGVPSRFSGSGSGTDFTFTISSLEAEDAATYYCQNDYSYPYTF |
| antibody | GQGTKVEIKRTVAAPSVFIFPPSDEQLKSGTASVVCLLNNFYPREAKVQWK |
| (spartalizumab) - | VDNALQSGNSQESVTEQDSKDSTYSLSSTLTLSKADYEKHKVYACEVTHQ |
| light chain | GLSSPVTKSFNRGEC |
| SEQ ID NO: 100 | QVQLVQSGVEVKKPGASVKVSCKASGYTFTNYYMYWVRQAPGQGLEWM |
| anti-PD1 | GGINPSNGGTNFNEKFKNRVTLTTDSSTTTAYMELKSLQFDDTAVYYCARR |
| antibody | DYRFDMGFDYWGQGITVTVSSASTKGPSVFPLAPCSRSTSESTAALGCLVK |
| (pembrolizumab) - | DYFPEPVTVSWNSGALTSGVHTFPAVLQSSGLYSLSSVVTVPSSSLGTKTYT |
| heavy chain | CNVDHKPSNTKVDKRVESKYGPPCPPCPAPEFLGGPSVFLFPPKPKDTLMIS |
| | RTPEVTCVVVDVSQEDPEVQFNWYVDGVEVHNAKTKPREEQFNSTYRVV |
| | SVLTVLHQDWLNGKEYKCKVSNKGLPSSIEKTISKAKGQPREPQVYTLPPS |
| | QEEMTKNQVSLTCLVKGFYPSDIAVEWESNGQPENNYKTTPPVLDSDGSFF |
| | LYSRLTVDKSRWQEGNVFSCSVMHEALHNHYTQKSLSLSLGK |
| SEQ ID NO: 101 | EIVLTQSPATLSLSPGERATLSCRASKGVSTSGYSYLHWYQQKPGQAPRLLI |
| anti-PD1 | YLASYLESGVPARFSGSGSGTDFTLTISSLEPEDFAVYYCQHSRDLPLTFGG |
| antibody | GTKVEIKRTVAAPSVFIFPPSDEQLKSGTASVVCLLNNFYPREAKVQWKVD |
| (pembrolizumab) - | NALQSGNSQESVTEQDSKDSTYSLSSTLTLSKADYEKHKVYACEVTHQGLS |
| light chain | SPVTKSFNRGEC |
| SEQ ID NO: 102 | EIQLVQSGAEVKKPGSSVKVSCKASGYTFTHYGMNWVRQAPGQGLEWVG |
| anti-PD1 | WVNTYTGEPTYADDFKGRLTFTLDTSTSTAYMELSSLRSEDTAVYYCTRE |
| antibody (ABBV- | GEGLGFGDWGQGTTVTVSSASTKGPSVFPLAPSSKSTSGGTAALGCLVKDY |
| 181) - heavy chain | FPEPVTVSWNSGALTSGVHTFPAVLQSSGLYSLSSVVTVPSSSLGTQTYICN |
| | VNHKPSNTKVDKKVEPKSCDKTHTCPPCPAPEAAGGPSVFLFPPKPKDTLM |
| | ISRTPEVTCVVVDVSHEDPEVKFNWYVDGVEVHNAKTKPREEQYNSTYRV |
| | VSVLTVLHQDWLNGKEYKCKVSNKALPAPIEKTISKAKGQPREPQVYTLPP |
| | SREEMTKNQVSLTCLVKGFYPSDIAVEWESNGQPENNYKTTPPVLDSDGSF |
| | FLYSKLTVDKSRWQQGNVFSCSVMHEALHNHYTQKSLSLSPGK |
| SEQ ID NO: 103 | DVVMTQSPLSLPVTPGEPASISCRSSQSIVHSHGDTYLEWYLQKPGQSPQLL |
| anti -PD1 | IYKVSNRFSGVPDRFSGSGSGTDFTLKISRVEAEDVGVYYCFQGSHIPVTFG |
| antibody (ABBV. - | QGTKLEIKRTVAAPSVFIFPPSDEQLKSGTASVVCLLNNFYPREAKVQWKV |
| 181) - light chain | DNALQSGNSQESVTEQDSKDSTYSLSSTLTLSKADYEKHKVYACEVTHQG |
| | LSSPVTKSFNRGEC |
| SEQ ID NO: 104 | QVQLVESGGGVVQPGRSLRLDCKASGITFSNSGMHWVRQAPGKGLEWVA |
| anti-PD1 | VIWYDGSKRYYADSVKGRFTISRDNSKNTLFLQMNSLRAEDTAVYYCATN |
| antibody | DDYWGQGTLVTVSSASTKGPSVFPLAPCSRSTSESTAALGCLVKDYFPEPV |
| (nivolumab) - | TVSWNSGALTSGVHTFPAVLQSSGLYSLSSVVTVPSSSLGTKTYTCNVDHK |
| heavy chain | PSNTKVDKRVESKYGPPCPPCPAPEFLGGPSVFLFPPKPKDTLMISRTPEVTC |
| | VVVDVSQEDPEVQFNWYVDGVEVHNAKTKPREEQFNSTYRVVSVLTVLH |
| | QDWLNGKEYKCKVSNKGLPSSIEKTISKAKGQPREPQVYTLPPSQEEMTKN |
| | QVSLTCLVKGFYPSDIAVEWESNGQPENNYKTTPPVLDSDGSFFLYSRLTV |
| | DKSRWQEGNVFSCSVMHEALHNHYTQKSLSLSLGK |
| SEQ ID NO: 105 | EIVLTQSPATLSLSPGERATLSCRASQSVSSYLAWYQQKPGQAPRLLIYDAS |
| anti-PD1 | NRATGIPARFSGSGSGTDFTLTISSLEPEDFAVYYCQQSSNWPRTFGQGTKV |
| antibody | EIKRTVAAPSVFIFPPSDEQLKSGTASVVCLLNNFYPREAKVQWKVDNALQ |
| (nivolumab) - | SGNSQESVTEQDSKDSTYSLSSTLTLSKADYEKHKVYACEVTHQGLSSPVT |
| light chain | KSFNRGEC |
| SEQ ID NO: 106 | EVTLRESGPALVKPTQTLTLTCTFSGFSLSTYGMGVGWIRQPPGKALEWLA |
| anti-PDGF | NIWWDDDKYYNPSLKNRLTISKDTSKNQVVLTMTNMDPVDTATYYCARIE |
| antibody (ab1) - | SSGPKYSFDYWGQGTMVTVSSASTKGPSVFPLAPSSKSTSGGTAALGCLVK |
| heavy chain | DYFPEPVTVSWNSGALTSGVHTFPAVLQSSGLYSLSSVVTVPSSSLGTQTYI |
| | CNVNHKPSNTKVDKKVEPKSCDKTHTCPPCPAPELLGGPSVFLFPPKPKDT |
| | LMISRTPEVTCVVVDVSHEDPEVKFNWYVDGVEVHNAKTKPREEQYNSTY |
| | RVVSVLTVLHQDWLNGKEYKCKVSNKALPAPIEKTISKAKGQPREPQVYT |
| | LPPSREEMTKNQVSLTCLVKGFYPSDIAVEWESNGQPENNYKTTPPVLDSD |
| | GSFFLYSKLTVDKSRWQQGNVFSCSVMHEALHNHYTQKSLSLSPGK |
| SEQ ID NO: 107 | EIVLTOSPGTLSLSPGERATLSCRASSGSIWYSFVSWYOQKPGQAPRLLIYA |
| anti-PDGF | DDQRASGIPDRFSGSGSGTDFTLTISRLEPEDFAVYYCQSYGINIDVVFGGGT |
| antibody (ab1) - | KVEIKRTVAAPSVFIFPPSDEQLKSGTASVVCLLNNFYPREAKVQWKVDNA |
| light chain | LQSGNSQESVTEQDSKDSTYSLSSTLTLSKADYEKHKVYACEVTHQGLSSP |
| | VTKSFNRGEC |
| SEQ ID NO: 108 | EVQLVESGGGLVQPGGSLRLSCAASGFTFSDSWIHWVRQAPGKGLEWVA |
| anti-PDL1 | WISPYGGSTYYADSVKGRFTISADTSKNTAYLQMNSLRAEDTAVYYCARR |
| antibody | HWPGGFDYWGQGTLVTVSAASTKGPSVFPLAPSSKSTSGGTAALGCLVKD |
| (atezolizumab) - | YFPEPVTVSWNSGALTSGVHTFPAVLQSSGLYSLSSVVTVPSSSLGTQTYIC |
| heavy chain | NVNHKPSNTKVDKKVEPKSCDKTHTCPPCPAPELLGGPSVFLFPPKPKDTL |
| | MISRTPEVTCVVVDVSHEDPEVKFNWYVDGVEVHNAKTKPREEQYASTYR |
| | VVSVLTVLHQDWLNGKEYKCKVSNKALPAPIEKTISKAKGQPREPQVYTLP |
| | PSREEMTKNQVSLTCLVKGFYPSDIAVEWESNGQPENNYKTTPPVLDSDGS |
| | FFLYSKLTVDKSRWQQGNVFSCSVMHEALHNHYTQKSLSLSPGK |
| SEQ ID NO: 109 | DIQMTQSPSSLSASVGDRVTITCRASQDVSTAVAWYQQKPGKAPKLLIYSA |
| anti-PDL1 | SFLYSGVPSRFSGSGSGTDFTLTISSLQPEDFATYYCQQYLYHPATFGQGTK |
| antibody | VEIKRTVAAPSVFIFPPSDEQLKSGTASVVCLLNNFYPREAKVQWKVDNAL |
| (atezolizumab) - | QSGNSQESVTEQDSKDSTYSLSSTLTLSKADYEKHKVYACEVTHQGLSSPV |
| light chain | TKSFNRGEC |
| SEQ ID NO: 110 | EVQLLESGGGLVQPGGSLRLSCAASGFTFSSYIMMWVRQAPGKGLEWVSSI |
| anti-PDL1 | YPSGGITFYADTVKGRFTISRDNSKNTLYLQMNSLRAEDTAVYYCARIKLG |
| antibody | TVTTVDYWGQGTLVTVSSASTKGPSVFPLAPSSKSTSGGTAALGCLVKDYF |
| (avelumab) - | PEPVTVSWNSGALTSGVHTFPAVLQSSGLYSLSSVVTVPSSSLGTQTYICNV |
| heavy chain | NHKPSNTKVDKRVEPKSCDKTHTCPPCPAPELLGGPSVFLFPPKPKDTLMIS |
| | RTPEVTCVVVDVSHEDPEVKFNWYVDGVEVHNAKTKPREEQYNSTYRVV |
| | SVLTVLHQDWLNGKEYKCKVSNKALPAPIEKTISKAKGQPREPQVYTLPPS |
| | REEMTKNQVSLTCLVKGFYPSDIAVEWESNGQPENNYKTTPPVLDSDGSFF |
| | LYSKLTVDKSRWQQGNVFSCSVMHEALHNHYTQKSLSLSPGK |
| SEQ ID NO: 111 | QSALTQPASVSGSPGQSITISCTGTSSDVGGYNYVSWYQQHPGKAPKLMIY |
| anti-PDL1 | DVSNRPSGVSNRFSGSKSGNTASLTISGLQAEDEADYYCSSYTSSSTRVFGT |
| antibody | GTKVTVLGQPKANPTVTLFPPSSEELQANKATLVCLISDFYPGAVTVAWKA |
| (avelumab) - light | DGSPVKAGVETTKPSKQSNNKYAASSYLSLTPEQWKSHRSYSCQVTHEGS |
| chain | TVEKTVAPTECS |
| SEQ ID NO: 112 | EVQLVESGGGLVQPGGSLRLSCAASGFTFSRYWMSWVRQAPGKGLEWVA |
| anti-PDL1 | NIKQDGSEKYYVDSVKGRFTISRDNAKNSLYLQMNSLRAEDTAVYYCARE |
| antibody | GGWFGELAFDYWGQGTLVTVSSASTKGPSVFPLAPSSKSTSGGTAALGCL |
| (durvalumab) - | VKDYFPEPVTVSWNSGALTSGVHTFPAVLQSSGLYSLSSVVTVPSSSLGTQT |
| heavy chain | YICNVNHKPSNTKVDKRVEPKSCDKTHTCPPCPAPEFEGGPSVFLFPPKPKD |
| | TLMISRTPEVTCVVVDVSHEDPEVKFNWYVDGVEVHNAKTKPREEQYNST |
| | YRVVSVLTVLHQDWLNGKEYKCKVSNKALPASIEKTISKAKGQPREPQVY |
| | TLPPSREEMTKNQVSLTCLVKGFYPSDIAVEWESNGQPENNYKTTPPVLDS |
| | DGSFFLYSKLTVDKSRWQQGNVFSCSVMHEALHNHYTQKSLSLSPGK |
| SEQ ID NO: 113 | EIVLTQSPGTLSLSPGERATLSCRASQRVSSSYLAWYQQKPGQAPRLLIYDA |
| anti-PDL1 | SSRATGIPDRFSGSGSGTDFTLTISRLEPEDFAVYYCQQYGSLPWTFGQGTK |
| antibody | VEIKRTVAAPSVFIFPPSDEQLKSGTASVVCLLNNFYPREAKVQWKVDNAL |
| (durvalumab) - | QSGNSQESVTEQDSKDSTYSLSSTLTLSKADYEKHKVYACEVTHQGLSSPV |
| light chain | TKSFNRGEC |
| SEQ ID NO: 114 | EVQLVQSGAEVKKPGSSVKVSCKASGYTFTTYWMHWVRQAPGQGLEWIG |
| anti-PRLR | EIDPSDSYSNYNQKFKDRATLTVDKSTSTAYMELSSLRSEDTAVYYCARNG |
| antibody (ab1) - | GLGPAWFSYWGQGTLVTVSSASTKGPSVFPLAPSSKSTSGGTAALGCLVKD |
| heavy chain | YFPEPVTVSWNSGALTSGVHTFPAVLQSSGLYSLSSVVIVPSSSLGTQTYICN |
| | VNHKPSNTKVDKKVEPKSCDKTHTCPPCPAPELLGGPCVFLFPPKPKDTLM |
| | ISRTPEVTCVVVDVSHEDPEVKFNWYVDGVEVHNAKTKPREEQYNSTYRV |
| | VSVLTVLHQDWLNGKEYKCKVSNKALPAPIEKTISKAKGQPREPQVYTLPP |
| | SREEMTKNQVSLTCLVKGFYPSDIAVEWESNGQPENNYKTTPPVLDSDGSF |
| | FLYSKLTVDKSRWQQGNVFSCSVMHEALHNHYTQKSLSLSPGK |
| SEQ ID NO: 115 | DIQMTQSPSSVSASVGDRVTITCKASQYVGTAVAWYQQKPGKSPKLLIYSA |
| anti-PRLR | SNRYTGVPSRFSDSGSGTDFTLTISSLQPEDFATYFCQQYSSYPWTFGGGTK |
| antibody (ab1) - | VEIKRTVAAPSVFIFPPSDEQLKSGTASVVCLLNNFYPREAKVQWKVDNAL |
| | QSGNSQESVTEQDSKDSTYSLSSTLTLSKADYEKHKVYACEVTHQGLSSPV |
| light chain | TKSFNRGEC |
| SEQ ID NO: 116 | QLQESGPGLVKPSQTLSLTCTVSGGSISSGGYYWSWIRQHPGKGLEWIGYIY |
| anti-PSCA | YSGSTYYNPSLKSRVTISVDTSKNQFSLKLSSGTAADTAVYYCARDHITMV |
| antibody (ab1) - | RGVPKGMDVWGQGTTVTVSSASTKGPSVFPLAPSSKSTSGGTAALGCLVK |
| heavy chain | DYFPEPVTVSWNSGALTSGVHTFPAVLQSSGLYSLSSVVTVPSSSLGTQTYI |
| | CNVNHKPSNTKVDKKVEPKSCDKTHTCPPCPAPELLGGPSVFLFPPKPKDT |
| | LMISRTPEVTCVVVDVSHEDPEVKFNWYVDGVEVHNAKTKPREEQYNSTY |
| | RVVSVLTVLHQDWLNGKEYKCKVSNKALPAPIEKTISKAKGQPREPQVYT |
| | LPPSREEMTKNQVSLTCLVKGFYPSDIAVEWESNGQPENNYKTTPPVLDSD |
| | GSFFLYSKLTVDKSRWQQGNVFSCSVMHEALHNHYTQKSLSLSPGK |
| SEQ ID NO: 117 | QLTQSPSSLSASVGDRVTITCRASQSISRHLNWYQQKPGKAPKFLIYVASSL |
| anti-PSCA | QSGVPSRFSGSGSGTDFTLTISSLQPEDFATYFCQQSYSIPRTFGQGTKVEIK |
| antibody (ab1) - | RTVAAPSVFIFPPSDEQLKSGTASVVCLLNNFYPREAKVQWKVDNALQSGN |
| light chain | SQESVTEQDSKDSTYSLSSTLTLSKADYEKHKVYACEVTHQGLSSPVTKSF |
| | NRGEC |
| SEQ ID NO: 118 | QVQLVESGGGVVQPGRSLRLSCAASGFTFSNYVMHWVRQAPGKGLEWVA |
| anti-PSMA | IIWYDGSNKYYADSVKGRFTISRDNSKNTLYLQMNSLRAEDTAVYYCAGG |
| antibody (ab2) - | YNWNYEYHYYGMDVWGQGTTVTVSSASTKGPSVFPLAPSSKSTSGGTAA |
| heavy chain | LGCLVKDYFPEPVTVSWNSGALTSGVHTFPAVLQSSGLYSLSSVVTVPSSSL |
| | GTQTYICNVNHKPSNTKVDKKVEPKSCDKTHTCPPCPAPELLGGPSVFLFPP |
| | KPKDTLMISRTPEVTCVVVDVSHEDPEVKFNWYVDGVEVHNAKTKPREEQ |
| | YNSTYRVVSVLTVLHQDWLNGKEYKCKVSNKALPAPIEKTISKAKGQPRE |
| | PQVYTLPPSREEMTKNQVSLTCLVKGFYPSDIAVEWESNGQPENNYKTTPP |
| | VLDSDGSFFLYSKLTVDKSRWQQGNVFSCSVMHEALHNHYTQKSLSLSPG |
| | K |
| SEQ ID NO: 119 | DIQMTQSPSSLSASVGDRVTITCRASQGITNYLAWFQQKPGKAPKSLIYAAS |
| anti-PSMA | SLQSGVPSKFSGSGSGTDFSLTISSLQPEDFATYYCQQYNSYPITFGQGTRLE |
| antibody (ab2) - | IKRTVAAPSVFIFPPSDEQLKSGTASVVCLLNNFYPREAKVQWKVDNALQS |
| light chain | GNSQESVTEQDSKDSTYSLSSTLTLSKADYEKHKVYACEVTHQGLSSPVTK |
| | SFNRGEC |
| SEQ ID NO: 120 | QVQLVESGGGVVQPGRSLRLSCAASGFAFSRYGMHWVRQAPGKGLEWVA |
| anti-PSMA | VIWYDGSNKYYADSVKGRFTISRDNSKNTQYLQMNSLRAEDTAVYYCAR |
| antibody (ab1) - | GGDFLYYYYYGMDVWGQGTTVTVSSASTKGPSVFPLAPSSKSTSGGTAAL |
| heavy chain | GCLVKDYFPEPVTVSWNSGALTSGVHTFPAVLQSSGLYSLSSVVTVPSSSL |
| | GTQTYICNVNHKPSNTKVDKKVEPKSCDKTHTCPPCPAPELLGGPSVFLFPP |
| | KPKDTLMISRTPEVTCVVVDVSHEDPEVKFNWYVDGVEVHNAKTKPREEQ |
| | YNSTYRVVSVLTVLHQDWLNGKEYKCKVSNKALPAPIEKTISKAKGQPRE |
| | PQVYTLPPSREEMTKNQVSLTCLVKGFYPSDIAVEWESNGQPENNYKTTPP |
| | VLDSDGSFFLYSKLTVDKSRWQQGNVFSCSVMHEALHNHYTQKSLSLSPG |
| | K |
| SEQ ID NO: 121 | DIQMTQSPSSLSASVGDRVTITCRASQGISNYLAWYQQKTGKVPKFLIYEAS |
| anti-PSMA | TLQSGVPSRFSGGGSGTDFTLTISSLQPEDVATYYCQNYNSAPFTFGPGTKV |
| antibody (ab1) - | DIKRTVAAPSVFIFPPSDEQLKSGTASVVCLLNNFYPREAKVQWKVDNALQ |
| light chain | SGNSQESVTEQDSKDSTYSLSSTLTLSKADYEKHKVYACEVTHQGLSSPVT |
| | KSFNRGEC |
| SEQ ID NO: 122 | QVQLVQSGPEVKKPGASVKVSCKASGYTFTDYAVHWVRQAPGKRLEWIG |
| anti-PTK7 | VISTYNDYTYNNQDFKGRVTMTRDTSASTAYMELSRLRSEDTAVYYCARG |
| antibody | NSYFYALDYWGQGTSVTVSSASTKGPSVFPLAPSSKSTSGGTAALGCLVKD |
| (hSC6.24) - heavy | YFPEPVTVSWNSGALTSGVHTFPAVLQSSGLYSLSSVVTVPSSSLGTQTYIC |
| chain | NVNHKPSNTKVDKKVEPKSCDKTHTCPPCPAPELLGGPSVFLFPPKPKDTL |
| | MISRTPEVTCVVVDVSHEDPEVKFNWYVDGVEVHNAKTKPREEQYNSTYR |
| | VVSVLTVLHQDWLNGKEYKCKVSNKALPAPIEKTISKAKGQPREPQVYTLP |
| | PSREEMTKNQVSLTCLVKGFYPSDIAVEWESNGQPENNYKTTPPVLDSDGS |
| | FFLYSKLTVDKSRWQQGNVFSCSVMHEALHNHYTQKSLSLSPGK |
| SEQ ID NO: 123 | EIVLTQSPATLSLSPGERATLSCRASESVDSYGKSFMHWYQQKPGQAPRLLI |
| anti-PTK7 | YRASNLESGIPARFSGSGSGTDFTLTISSLEPEDFAVYYCQQSNEDPWTFGG |
| antibody | GTKLEIKRTVAAPSVFIFPPSDEQLKSGTASVVCLLNNFYPREAKVQWKVD |
| (hSC6.24) - light | NALQSGNSQESVTEQDSKDSTYSLSSTLTLSKADYEKHKVYACEVTHQGLS |
| chain | SPVTKSFNRGEC |
| SEQ ID NO: 124 | EVQLVQSGAEVKKPGESLKISCKGSGYSFTSSWINWVRQMPGKGLEWMGR |
| anti-SEZ6 | IYPGEGDTNYSGNFEGQVTISADKSISTAYLQWSSLKASDTAMYYCTRGLV |
| antibody | MDYWGQGTLVTVSSASTKGPSVFPLAPSSKSTSGGTAALGCLVKDYFPEPV |
| (hSC17.200) - | TVSWNSGALTSGVHTFPAVLQSSGLYSLSSVVTVPSSSLGTQTYICNVNHKP |
| heavy chain | SNTKVDKKVEPKSCDKTHTCPPCPAPELLGGPSVFLFPPKPKDTLMISRTPE |
| | VTCVVVDVSHEDPEVKFNWYVDGVEVHNAKTKPREEQYNSTYRVVSVLT |
| | VLHQDWLNGKEYKCKVSNKALPAPIEKTISKAKGQPREPQVYTLPPSREEM |
| | TKNQVSLTCLVKGFYPSDIAVEWESNGQPENNYKTTPPVLDSDGSFFLYSK |
| | LTVDKSRWQQGNVFSCSVMHEALHNHYTQKSLSLSPGK |
| SEQ ID NO: 125 | EIVLTQSPATLSLSPGERATLSCRASQSVDYNGISYMHWYQQKPGQAPRLLI |
| anti-SEZ6 | YAASNVQSGIPARFSGSGSGTDFTLTISSLEPEDFAVYYCQQSIEDPPTFGGG |
| antibody | TKVEIKRTVAAPSVFIFPPSDEQLKSGTASVVCLLNNFYPREAKVQWKVDN |
| (hSC17.200) - | ALQSGNSQESVTEQDSKDSTYSLSSTLTLSKADYEKHKVYACEVTHQGLSS |
| light chain | PVTKSFNRGEC |
| SEQ ID NO: 126 | EVQLVESGGGLVQPGGSLRLSCAASGFDFSRYWMSWVRQAPGKGLEWIG |
| anti-SLAMF7 | EINPDSSTINYAPSLKDKFIISRDNAKNSLYLQMNSLRAEDTAVYYCARPDG |
| antibody | NYWYFDVWGQGTLVTVSSASTKGPSVFPLAPSSKSTSGGTAALGCLVKDY |
| (elotuzumab) - | FPEPVTVSWNSGALTSGVHTFPAVLQSSGLYSLSSVVTVPSSSLGTQTYICN |
| heavy chain | VNHKPSNTKVDKKVEPKSCDKTHTCPPCPAPELLGGPSVFLFPPKPKDTLMI |
| | SRTPEVTCVVVDVSHEDPEVKFNWYVDGVEVHNAKTKPREEQYNSTYRV |
| | VSVLTVLHQDWLNGKEYKCKVSNKALPAPIEKTISKAKGQPREPQVYTLPP |
| | SRDELTKNQVSLTCLVKGFYPSDIAVEWESNGQPENNYKTTPPVLDSDGSF |
| | FLYSKLTVDKSRWQQGNVFSCSVMHEALHNHYTQKSLSLSPGK |
| SEQ ID NO: 127 | DIQMTQSPSSLSASVGDRVTITCKASQDVGIAVAWYQQKPGKVPKLLIYWA |
| anti-SLAMF7 | STRHTGVPDRFSGSGSGTDFTLTISSLQPEDVATYYCQQYSSYPYTFGQGTK |
| antibody | VEIKRTVAAPSVFIFPPSDEQLKSGTASVVCLLNNFYPREAKVQWKVDNAL |
| (elotuzumab) - | QSGNSQESVTEQDSKDSTYSLSSTLTLSKADYEKHKVYACEVTHQGLSSPV |
| light chain | TKSFNRGEC |
| SEQ ID NO: 128 | EVQLLESGGGLVQPGGSLRLSCAASGFTFSNYAMSWVRQAPGKGLEWVSS |
| anti-TF antibody | ISGSGDYTYYTDSVKGRFTISRDNSKNTLYLQMNSLRAEDTAVYYCARSP |
| (tisotumab) - | WGYYLDSWGQGTLVTVSSASTKGPSVFPLAPSSKSTSGGTAALGCLVKDY |
| heavy chain | FPEPVTVSWNSGALTSGVHTFPAVLQSSGLYSLSSVVTVPSSSLGTQTYICN |
| | VNHKPSNTKVDKRVEPKSCDKTHTCPPCPAPELLGGPSVFLFPPKPKDTLMI |
| | SRTPEVTCVVVDVSHEDPEVKFNWYVDGVEVHNAKTKPREEQYNSTYRV |
| | VSVLTVLHQDWLNGKEYKCKVSNKALPAPIEKTISKAKGQPREPQVYTLPP |
| | SREEMTKNQVSLTCLVKGFYPSDIAVEWESNGQPENNYKTTPPVLDSDGSF |
| | FLYSKLTVDKSRWQQGNVFSCSVMHEALHNHYTQKSLSLSPGK |
| SEQ ID NO: 129 | DIQMTQSPPSLSASAGDRVTITCRASQGISSRLAWYQQKPEKAPKSLIYAAS |
| anti-TF antibody | SLQSGVPSRFSGSGSGTDFTLTISSLQPEDFATYYCQQYNSYPYTFGQGTKL |
| (tisotumab) - light | EIKRTVAAPSVFIFPPSDEQLKSGTASVVCLLNNFYPREAKVQWKVDNALQ |
| chain | SGNSQESVTEQDSKDSTYSLSSTLTLSKADYEKHKVYACEVTHQGLSSPVT |
| | KSFNRGEC |
| SEQ ID NO: 130 | QVQLVQSGAEVKKPGSSVKVSCKASGGTFSSYAISWVRQAPGQGLEWMG |
| anti-TGFb | GIIPIFGTANYAQKFQGRVTITADESTSTAYMELSSLRSEDTAVYYCARGLW |
| antibody (XOMA- | EVRALPSVYWGQGTLVTVSSASTKGPSVFPLAPSSKSTSGGTAALGCLVKD |
| 089) - heavy chain | YFPEPVTVSWNSGALTSGVHTFPAVLQSSGLYSLSSVVTVPSSSLGTQTYIC |
| | NVNHKPSNTKVDKKVEPKSCDKTHTCPPCPAPELLGGPSVFLFPPKPKDTL |
| | MISRTPEVTCVVVDVSHEDPEVKFNWYVDGVEVHNAKTKPREEQYNSTYR |
| | VVSVLTVLHQDWLNGKEYKCKVSNKALPAPIEKTISKAKGQPREPQVYTLP |
| | PSREEMTKNQVSLTCLVKGFYPSDIAVEWESNGQPENNYKTTPPVLDSDGS |
| | FFLYSKLTVDKSRWQQGNVFSCSVMHEALHNHYTQKSLSLSPGK |
| SEQ ID NO: 131 | SYELTQPPSVSVAPGQTARITCGANDIGSKSVHWYQQKAGQAPVLVVSEDI |
| anti-TGFb | IRPSGIPERISGSNSGNTATLTISRVEAGDEADYYCQVWDRDSDQYVFGTGT |
| antibody (XOMA- | KVTVLGQPKAAPSVTLFPPSSEELQANKATLVCLISDFYPGAVTVAWKADS |
| 089) - light chain | SPVKAGVETTTPSKQSNNKYAASSYLSLTPEQWKSHRSYSCQVTHEGSTVE |
| | KTVAPTECS |
| SEQ ID NO: 132 | QVQLVQSGAEVKKPGSSVKVSCKASGYTFSSNVISWVRQAPGQGLEWMG |
| anti-TGFb | GVIPIVDIANYAQRFKGRVTITADESTSTTYMELSSLRSEDTAVYYCASTLG |
| antibody | LVLDAMDYWGQGTLVTVSSASTKGPSVFPLAPCSRSTSESTAALGCLVKD |
| (fresolimumab) - | YFPEPVTVSWNSGALTSGVHTFPAVLQSSGLYSLSSVVTVPSSSLGTKTYTC |
| heavy chain | NVDHKPSNTKVDKRVESKYGPPCPSCPAPEFLGGPSVFLFPPKPKDTLMISR |
| | TPEVTCVVVDVSQEDPEVQFNWYVDGVEVHNAKTKPREEQFNSTYRVVS |
| | VLTVLHQDWLNGKEYKCKVSNKGLPSSIEKTISKAKGQPREPQVYTLPPSQ |
| | EEMTKNQVSLTCLVKGFYPSDIAVEWESNGQPENNYKTTPPVLDSDGSFFL |
| | YSRLTVDKSRWQEGNVFSCSVMHEALHNHYTQKSLSLSLGK |
| SEQ ID NO: 133 | ETVLTQSPGTLSLSPGERATLSCRASQSLGSSYLAWYQQKPGQAPRLLIYGA |
| anti-TGFb | SSRAPGIPDRFSGSGSGTDFTLTISRLEPEDFAVYYCQQYADSPITFGQGTRL |
| antibody | EIKRTVAAPSVFIFPPSDEQLKSGTASVVCLLNNFYPREAKVQWKVDNALQ |
| (fresolimumab) - | SGNSQESVTEQDSKDSTYSLSSTLTLSKADYEKHKVYACEVTHQGLSSPVT |
| light chain | KSFNRGEC |
| SEQ ID NO: 134 | QLQVQESGPGLVKPSETLSLTCTVSGGSISNSYFSWGWIRQPPGKGLEWIGS |
| anti-TGFbRII | FYYGEKTYYNPSLKSRATISIDTSKSQFSLKLSSVTAADTAVYYCPRGPTMI |
| antibody | RGVIDSWGQGTLVTVSSASTKGPSVFPLAPSSKSTSGGTAALGCLVKDYFP |
| (LY3022859) - | EPVTVSWNSGALTSGVHTFPAVLQSSGLYSLSSVVTVPSSSLGTQTYICNVN |
| heavy chain | HKPSNTKVDKRVEPKSCDKTHTCPPCPAPEAEGAPSVFLFPPKPKDTLMISR |
| | TPEVTCVVVDVSHEDPEVKFNWYVDGVEVHNAKTKPREEQYNSTYRVVS |
| | VLTVLHQDWLNGKEYKCKVSNKALPSSIEKTISKAKGQPREPQVYTLPPSR |
| | EEMTKNQVSLTCLVKGFYPSDIAVEWESNGQPENNYKTTPPVLDSDGSFFL |
| | YSKLTVDKSRWQQGNVFSCSVMHEALHNHYTQKSLSLSPGK |
| SEQ ID NO: 135 | EIVLTQSPATLSLSPGERATLSCRASQSVRSYLAWYQQKPGQAPRLLIYDAS |
| anti-TGFbRII | NRATGIPARFSGSGSGTDFTLTISSLEPEDFAVYYCQQRSNWPPTFGQGTKV |
| antibody | EIKRTVAAPSVFIFPPSDEQLKSGTASVVCLLNNFYPREAKVQWKVDNALQ |
| (LY3022859) - | SGNSQESVTEQDSKDSTYSLSSTLTLSKADYEKFDVYACEVTHQGLSSPVT |
| light chain | KSFNRGEC |
| SEQ ID NO: 136 | QVQLQESGPGLVKPSETLSLTCAVSGYSITSDYAWNWIRQPPGKGLEWIGY |
| anti-TIGIT | ISYSGSTSYNPSLRSRVTISRDTSKNQFFLKLSSVTAADTAVYYCARRQVGL |
| antibody | GFAYWGQGTLVTVSSASTKGPSVFPLAPSSKSTSGGTAALGCLVKDYFPEP |
| (etigilimab) - | VTVSWNSGALTSGVHTFPAVLQSSGLYSLSSVVTVPSSSLGTQTYICNVNH |
| heavy chain | KPSNTKVDKRVEPKSCDKTHTCPPCPAPELLGGPSVFLFPPKPKDTLMISRT |
| | PEVTCVVVDVSHEDPEVKFNWYVDGVEVHNAKTKPREEQYNSTYRVVSV |
| | LTVLHQDWLNGKEYKCKVSNKALPAPIEKTISKAKGQPREPQVYTLPPSRE |
| | EMTKNQVSLTCLVKGFYPSDIAVEWESNGQPENNYKTTPPVLDSDGSFFLY |
| | SKLTVDKSRWQQGNVFSCSVMHEALHNHYTQKSLSLSPGK |
| SEQ ID NO: 137 | DIQMTQSPSSLSASVGDRVTITCKASQDVSTAVAWYQQKPGKAPKLLIYSA |
| anti-TIGIT | SYRYTGVPSRFSGSGSGTDFTFTISSLQPEDIATYYCQQHYSTPWTFGQGTK |
| antibody | VEIKRTVAAPSVFIFPPSDEQLKSGTASVVCLLNNFYPREAKVQWKVDNAL |
| (etigilimab) - light | QSGNSQESVTEQDSKDSTYSLSNTLTLSKADYEKHKVYACEVTHQGLSSPV |
| chain | TKSFNRGEC |
| SEQ ID NO: 138 | EVQLQQSGPGLVKPSQTLSLTCAISGDSVSSNSAAWNWIRQSPSRGLEWLG |
| anti-TIGIT | KTYYRFKWYSDYAVSVKGRITINPDTSKNQFSLQLNSVTPEDTAVFYCTRE |
| antibody | STTYDLLAGPFDYWGQGTLVTVSSASTKGPSVFPLAPSSKSTSGGTAALGC |
| (tiragolumab) - | LVKDYFPEPVTVSWNSGALTSGVHTFPAVLQSSGLYSLSSVVTVPSSSLGTQ |
| heavy chain | TYICNVNHKPSNTKVDKKVEPKSCDKTHTCPPCPAPELLGGPSVFLFPPKPK |
| | DTLMISRTPEVTCVVVDVSHEDPEVKFNWYVDGVEVHNAKTKPREEQYNS |
| | TYRVVSVLTVLHQDWLNGKEYKCKVSNKALPAPIEKTISKAKGQPREPQV |
| | YTLPPSREEMTKNQVSLTCLVKGFYPSDIAVEWESNGQPENNYKTTPPVLD |
| | SDGSFFLYSKLTVDKSRWQQGNVFSCSVMHEALHNHYTQKSLSLSPGK |
| SEQ ID NO: 139 | DIVMTQSPDSLAVSLGERATINCKSSQTVLYSSNNKKYLAWYQQKPGQPPN |
| anti-TIGIT | LLIYWASTRESGVPDRFSGSGSGTDFTLTISSLQAEDVAVYYCQQYYSTPFT |
| antibody | FGPGTKVEIKRTVAAPSVFIFPPSDEQLKSGTASVVCLLNNFYPREAKVQW |
| (tiragolumab) - | KVDNALQSGNSQESVTEQDSKDSTYSLSSTLTLSKADYEKHKVYACEVTH |
| light chain | QGLSSPVTKSFNRGEC |
| SEQ ID NO: 140 | QSALTQPRSVSGSPGQSVTISCTGTSSDVGGYNYVSWYQQHPGKAPKLMIY |
| anti-TIM3 | DVSKRPSGVPDRFSGSKSGNTASLTISGLQAEDEADYYCSSYADSVVFGGG |
| antibody (M6903) | TKVTVLGQPKAAPSVTLFPPSSEELQANKATLVCLISDFYPGAVTVAWKAD |
| - heavy chain | SSPVKAGVETTTPSKQSNNKYAASSYLSLTPEQWKSHKSYSCQVTHEGSTV |
| | EKTVAPTECS |
| SEQ ID NO: 141 | EVQLVESGGGLVQPGGSLRLSCAASGFTFSSYAMSWVRQAPGKGLEWVSA |
| anti-TIM3 | ISVSGGSTYYADSVKGRFTISRDNSKNTLYLQMNSLRAEDTAVYYCAKAN |
| antibody (M6903) | WGFFDYWGQGTLVTVSSASTKGPSVFPLAPSSKSTSGGTAALGCLVKDYFP |
| - light chain | EPVTVSWNSGALTSGVHTFPAVLQSSGLYSLSSVVTVPSSSLGTQTYICNVN |
| | HKPSNTKVDKKVEPKSCDKTHTCPPCPAPELLGGPSVFLFPPKPKDTLMISR |
| | TPEVTCVVVDVSHEDPEVKFNWYVDGVEVHNAKTKPREEQYNSTYRVVS |
| | VLTVLHQDWLNGKEYKCKVSNKALPAPIEKTISKAKGQPREPQVYTLPPSR |
| | EEMTKNQVSLTCLVKGFYPSDIAVEWESNGQPENNYKTTPPVLDSDGSFFL |
| | YSKLTVDKSRWQQGNVFSCSVMHEALHNHYTQKSLSLSPGK |
| SEQ ID NO: 142 | EVQLVESGGGLVQPGGSLRLSCAASGYDFTHYGMNWVRQAPGKGLEWV |
| anti-VEGF | GWINTYTGEPTYAADFKRRFTFSLDTSKSTAYLQMNSLRAEDTAVYYCAK |
| antibody | YPYYYGTSHWYFDVWGQGTLVTVSSASTKGPSVFPLAPSSKSTSGGTAAL |
| (ranibizumab) - | GCLVKDYFPEPVTVSWNSGALTSGVHTFPAVLQSSGLYSLSSVVTVPSSSL |
| heavy chain | GTQTYICNVNHKPSNTKVDKKVEPKSCDKTHLCPPCPAPELLGGPSVFLFPP |
| | KPKDTLMISRTPEVTCVVVDVSHEDPEVKFNWYVDGVEVHNAKTKPREEQ |
| | YNSTYRVVSVLTVLHQDWLNGKEYKCKVSNKALPAPIEKTISKAKGQPRE |
| | PQVYTLPPSREEMTKNQVSLTCLVKGFYPSDIAVEWESNGQPENNYKTTPP |
| | VLDSDGSFFLYSKLTVDKSRWQQGNVFSCSVMHEALHNHYTQKSLSLSPG |
| | K |
| SEQ ID NO: 143 | DIQLTQSPSSLSASVGDRVTITCSASQDISNYLNWYQQKPGKAPKVLIYFTSS |
| anti-VEGF | LHSGVPSRFSGSGSGTDFTLTISSLQPEDFATYYCQQYSTVPWTFGQGTKVE |
| antibody | IKRTVAAPSVFIFPPSDEQLKSGTASVVCLLNNFYPREAKVQWKVDNALQS |
| (ranibizumab) - | GNSQESVTEQDSKDSTYSLSSTLTLSKADYEKHKVYACEVTHQGLSSPVTK |
| light chain | SFNRGEC |
| SEQ ID NO: 144 | EVQLVESGGGLVQPGGSLRLSCAASGYTFTNYGMNWVRQAPGKGLEWVG |
| anti-VEGF | WINTYTGEPTYAADFKRRFTFSLDTSKSTAYLQMNSLRAEDTAVYYCAKY |
| antibody | PHYYGSSHWYFDVWGQGTLVTVSSASTKGPSVFPLAPSSKSTSGGTAALG |
| (bevacizumab) - | CLVKDYFPEPVTVSWNSGALTSGVHTFPAVLQSSGLYSLSSVVTVPSSSLGT |
| heavy chain | QTYICNVNHKPSNTKVDKKVEPKSCDKTHTCPPCPAPELLGGPSVFLFPPKP |
| | KDTLMISRTPEVTCVVVDVSHEDPEVKFNWYVDGVEVHNAKTKPREEQY |
| | NSTYRVVSVLTVLHQDWLNGKEYKCKVSNKALPAPIEKTISKAKGQPREP |
| | QVYTLPPSREEMTKNQVSLTCLVKGFYPSDIAVEWESNGQPENNYKTTPPV |
| | LDSDGSFFLYSKLTVDKSRWQQGNVFSCSVMHEALHNHYTQKSLSLSPGK |
| SEQ ID NO: 145 | EVQLVESGGGLVQPGGSLRLSCAASGFTFSNFPMAWVRQAPGKGLEWVAT |
| anti-VEGF | ISSSDGTTYYRDSVKGRFTISRDNAKNSLYLQMNSLRAEDTAVYYCARGY |
| antibody (ABT- | YNSPFAYWGQGTLVTVSSASTKGPSVFPLAPSSKSTSGGTAALGCLVKDYF |
| 165) - heavy chain | PEPVTVSWNSGALTSGVHIFPAVLQSSGLYSLSSVVTVPSSSLGTQTYICNV |
| | NHKPSNTKVDKKVEPKSCDKTHTCPPCPAPEAAGGPSVFLFPPKPKDTLMIS |
| | RTPEVTCVVVDVSHEDPEVKFNWYVDGVEVHNAKTKPREEQYNSTYRVV |
| | SVLTVLHQDWLNGKEYKCKVSNKALPAPIEKTISKAKGQPREPQVYTLPPS |
| | REEMTKNQVSLTCLVKGFYPSDIAVEWESNGQPENNYKTTPPVLDSDGSFF |
| | LYSKLTVDKSRWQQGNVFSCSVMHEALHNHYTQKSLSLSPGK |
| SEQ ID NO: 146 | DIQMTQSPSSLSASVGDRVTITCRASEDIYSNLAWYQQKPGKAPKLLIYDTN |
| anti-VEGF | NLADGVPSRFSGSGSGTDFTLTISSLQPEDFATYYCQQYNNYPPTFGQGTKL |
| antibody (ABT- | EIKRTVAAPSVFIFPPSDEQLKSGTASVVCLLNNFYPREAKVQWKVDNALQ |
| 165) - light chain | SGNSQESVTEQDSKDSTYSLSSTLTLSKADYEKHKVYACEVTHQGLSSPVT |
| | KSFNRGEC |
| SEQ ID NO: 147 | EVQLVQSGGGLVKPGGSLRLSCAASGFTFSSYSMNWVRQAPGKGLEWVSS |
| anti-VEGFR | ISSSSSYIYYADSVKGRFTISRDNAKNSLYLQMNSLRAEDTAVYYCARVTD |
| antibody | AFDIWGQGTMVTVSSASTKGPSVFPLAPSSKSTSGGTAALGCLVKDYFPEP |
| (ramucirumab) - | VTVSWNSGALTSGVHTFPAVLQSSGLYSLSSVVTVPSSSLGTQTYICNVNH |
| heavy chain | KPSNTKVDKKVEPKSCDKTHTCPPCPAPELLGGPSVFLFPPKPKDTLMISRT |
| | PEVTCVVVDVSHEDPEVKFNWYVDGVEVHNAKTKPREEQYNSTYRVVSV |
| | LTVLHQDWLNGKEYKCKVSNKALPAPIEKTISKAKGQPREPQVYTLPPSRE |
| | EMTKNQVSLTCLVKGFYPSDIAVEWESNGQPENNYKTTPPVLDSDGSFFLY |
| | SKLTVDKSRWQQGNVFSCSVMHEALHNHYTQKSLSLSPGK |
| SEQ ID NO: 148 | DIQMTQSPSSVSASIGDRVTITCRASQGIDNWLGWYQQKPGKAPKLLIYDA |
| anti-VEGFR | SNLDTGVPSRFSGSGSGTYFTLTISSLQAEDFAVYFCQQAKAFPPTFGGGTK |
| antibody | VDIKGTVAAPSVFIFPPSDEQLKSGTASVVCLLNNFYPREAKVQWKVDNAL |
| (ramucirumab) - | QSGNSQESVTEQDSKDSTYSLSSTLTLSKADYEKHKVYACEVTHQGLSSPV |
| light chain | TKSFNRGEC |
| SEQ ID NO: 149 | QVQLVQSGAEVKKPGSSVKVSCKASGGTFSSYAISWVRQAPGQGLEWMG |
| anti-VISTA | GIIPIFGTANYAQKFQGRVTITADESTSTAYMELSSLRSEDTAVYYCARSSY |
| antibody | GWSYEFDYWGQGTLVTVSSASTKGPSVFPLAPSSKSTSGGTAALGCLVKD |
| (onvatilimab) - | YFPEPVTVSWNSGALTSGVHTFPAVLQSSGLYSLSSVVTVPSSSLGTQTYIC |
| heavy chain | NVNHKPSNTKVDKKVEPKSCDKTHTCPPCPAPELLGGPSVFLFPPKPKDTL |
| | MISRTPEVTCVVVDVSHEDPEVKFNWYVDGVEVHNAKTKPREEQYNSTYR |
| | VVSVLTVLHQDWLNGKEYKCKVSNKALPAPIEKTISKAKGQPREPQVYTLP |
| | PSREEMTKNQVSLTCLVKGFYPSDIAVEWESNGQPENNYKTTPPVLDSDGS |
| | FFLYSKLTVDKSRWQQGNVFSCSVMHEALHNHYTQKSLSLSPGK |
| SEQ ID NO: 150 | DIQMTQSPSSLSASVGDRVTITCRASQSIDTRLNWYQQKPGKAPKLLIYSAS |
| anti-VISTA | SLQSGVPSRFSGSGSGTDFTLTISSLQPEDFATYYCQQSAYNPITFGQGTKVE |
| antibody | IKRTVAAPSVFIFPPSDEQLKSGTASVVCLLNNFYPREAKVQWKVDNALQS |
| (onvatilimab) - | GNSQESVTEQDSKDSTYSLSSTLTLSKADYEKHKVYACEVTHQGLSSPVTK |
| light chain | SFNRGEC |
| SEQ ID NO: 151 | QVQLVQSGAEVKKPGASVKVSCKASGYIFTAYTMHWVRQAPGQGLEWM |
| anti-cMet | GWIKPNNGLANYAQKFQGRVTMTRDTSISTAYMELSRLRSDDTAVYYCAR |
| antibody | SEITTEFDYWGQGTLVTVSSASTKGPSVFPLAPSSKSTSGGTAALGCLVKDY |
| (telisotuzumab) - | FPEPVTVSWNSGALTSGVHTFPAVLQSSGLYSLSSVVTVPSSSLGTQTYICN |
| heavy chain | VNHKPSNTKVDKRVEPKSCDCHCPPCPAPELLGGPSVFLFPPKPKDTLMISR |
| | TPEVTCVVVDVSHEDPEVKFNWYVDGVEVHNAKTKPREEQYNSTYRVVS |
| | VLTVLHQDWLNGKEYKCKVSNKALPAPIEKTISKAKGQPREPQVYTLPPSR |
| | EEMTKNQVSLTCLVKGFYPSDIAVEWESNGQPENNYKTTPPVLDSDGSFFL |
| | YSKLTVDKSRWQQGNVFSCSVMHEALHNHYTQKSLSLSPG |
| SEQ ID NO: 152 | DIVMTQSPDSLAVSLGERATINCKSSESVDSYANSFLHWYQQKPGQPPKLLI |
| anti-cMet | YRASTRESGVPDRFSGSGSGTDFTLTISSLQAEDVAVYYCQQSKEDPLTFGG |
| antibody | GTKVEIKRTVAAPSVFIFPPSDEQLKSGTASVVCLLNNFYPREAKVQWKVD |
| (telisotuzumab) - | NALQSGNSQESVTEQDSKDSTYSLSSTLTLSKADYEKHKVYACEVTHQGLS |
| light chain | SPVTKSFNRGEC |
| SEQ ID NO: 153 | QVQLVQSGAEVKKPGASVKVSCKASGYTFTEYTLHWVRQAPGQRLEWM |
| anti-claudin | GGINPNNGDTIYNQKFKGRVTITRDTSASTAYMELSSLRSEDTAVYYCARR |
| antibody | AITVYAMDYWGQGTLVTVSSASTKGPSVFPLAPSSKSTSGGTAALGCLVK |
| (hSC27.1) - heavy | DYFPEPVTVSWNSGALTSGVHTFPAVLQSSGLYSLSSVVTVPSSSLGTQTYI |
| chain | CNVNHKPSNTKVDKKVEPKSCDKTHTCPPCPAPELLGGPSVFLFPPKPKDT |
| | LMISRTPEVTCVVVDVSHEDPEVKFNWYVDGVEVHNAKTKPREEQYNSTY |
| | RVVSVLTVLHQDWLNGKEYKCKVSNKALPAPIEKTISKAKGQPREPQVYT |
| | LPPSREEMTKNQVSLTCLVKGFYPSDIAVEWESNGQPENNYKTTPPVLDSD |
| | GSFFLYSKLTVDKSRWQQGNVFSCSVMHEALHNHYTQKSLSLSPGK |
| SEQ ID NO: 154 | DIQMTQSPSSVSASVGDRVTITCKASEDIYNRLAWYQQKPGKAPKLLIYGA |
| anti-claudin | TSLETGVPSRFSGSGSGTDYTLTISSLQPEDFATYYCQQYWSTPLTFGQGTK |
| antibody | LEIKRTVAAPSVFIFPPSDEQLKSGTASVVCLLNNFYPREAKVQWKVDNAL |
| (hSC27. 1) - light | QSGNSQESVTEQDSKDSTYSLSSTLTLSKADYEKHKVYACEVTHQGLSSPV |
| chain | TKSFNRGEC |
| SEQ ID NO: 155 | QVQLVQSGAEVKKPGASVKVSCQASGYRFSNFVIHWVRQAPGQRFEWMG |
| anti- gp120 | WINPYNGNKEFSAKFQDRVTFTADTSANTAYMELRSLRSADTAVYYCARV |
| antibody (B12) - | GPYSWDDSPQDNYYMDVWGKGTTVIVSSASTKGPSVFPLAPSSKSTSGGT |
| heavy chain | AALGCLVKDYFPEPVTVSWNSGALTSGVHTFPAVLQSSGLYSLSSVVTVPS |
| | SSLGTQTYICNVNHKPSNTKVDKRVEPKSCDKTHTCPPCPAPELLGGPSVFL |
| | FPPKPKDTLMISRTPEVTCVVVDVSHEDPEVKFNWYVDGVEVHNAKTKPR |
| | EEQYNSTYRVVSVLTVLHQDWLNGKEYKCKVSNKALPAPIEKTISKAKGQ |
| | PREPQVYTLPPSREEMTKNQVSLTCLVKGFYSDIAVEWESNGQPENNYKTT |
| | PPVLDSDGSFFLYSKLTVDKSRWQQGNVFSCSVMHEALHNHYTQKSLSLSP |
| | GK |
| SEQ ID NO: 156 | EIVLTQSPGTLSLSPGERATFSCRSSHSIRSRRVAWYQHKPGQAPRLVIHGVS |
| anti-gp120 | NRASGISDRFSGSGSGTDFTLTITRVEPEDFALYYCQVYGASSYTFGQGTKL |
| antibody (B12) - | ERKRTVAAPSVFIFPPSDEQLKSGTASVVCLLNNFYPREAKVQWKVDNALQ |
| light chain | SGNSQESVTEQDSKDSTYSLSSTLTLSKADYEKHKVYACEVTHQGLSSPVT |
| | KSFNRGEC |
| SEQ ID NO: 157 | EVQLVQSGAEVKKPGASVKVSCKASGDTFKRYYVHWVRQAPGQGLEWM |
| anti-mesothelin | GIINPSGVSTTYAQKFQGRVTMTRDTSTSTVYMELSSLRSEDTAVYYCAEV |
| antibody (ABBV- | RGSGFNYFGMDVWGQGTLVTVSSASTKGPSVFPLAPSSKSTSGGTAALGCL |
| 428) - heavy chain | VKDYFPEPVTVSWNSGALTSGVHTFPAVLQSSGLYSLSSVVTVPSSSLGTQT |
| | YICNVNHKPSNTKVDKKVEPKSCDKTHTCPPCPAPELLGGPSVFLFPPKPKD |
| | TLMISRTPEVTCVVVDVSHEDPEVKFNWYVDGVEVHNAKTKPREEQYNST |
| | YRVVSVLTVLHQDWLNGKEYKCKVSNKALPAPIEKTISKAKGQPREPQVY |
| | TLPPSREEMTKNQVSLTCLVKGFYPSDIAVEWESNGQPENNYKTTPPVLDS |
| | DGSFFLYSKLTVDKSRWQQGNVFSCSVMHEALHNHYTQKSLSLSPGK |
| SEQ ID NO: 158 | SYELTQPPSVSVSPGQTASITCSGDKLGDKYASWYQQKPGQSPVLVIYQDN |
| anti-mesothelin | RRPSGIPERFSGSNSGNTATLTISGTQAMDEADYYCQAWDSDTYVFGTGTK |
| antibody (ABBV- | VTVLGQPKAAPSVTLFPPSSEELQANKATLVCLISDFYPGAVTVAWKADSS |
| 428) - light chain | PVKAGVETTTPSKQSNNKYAASSYLSLTPEQWKSHRSYSCQVTHEGSTVEK |
| | TVAPTECS |
| SEQ ID NO: 159 | EVQLVESGGGLVQPGGSLRLSCAASGFTFSSYNMNWVRQAPGKGLEWVS |
| anti-nectin4 | YISSSSSTIYYADSVKGRFTISRDNAKNSLSLQMNSLRDEDTAVYYCARAY |
| antibody | YYGMDVWGQGTTVTVSSASTKGPSVFPLAPSSKSTSGGTAALGCLVKDYF |
| (enfortumab) - | PEPVTVSWNSGALTSGVHTFPAVLQSSGLYSLSSVVTVPSSSLGTQTYICNV |
| heavy chain | NHKPSNTKVDKRVEPKSCDKTHTCPPCPAPELLGGPSVFLFPPKPKDTLMIS |
| | RTPEVTCVVVDVSHEDPEVKFNWYVDGVEVHNAKTKPREEQYNSTYRVV |
| | SVLTVLHQDWLNGKEYKCKVSNKALPAPIEKTISKAKGQPREPQVYTLPPS |
| | REEMTKNQVSLTCLVKGFYPSDIAVEWESNGQPENNYKTTPPVLDSDGSFF |
| | LYSKLTVDKSRWQQGNVFSCSVMHEALHNHYTQKSLSLSPGK |
| SEQ ID NO: 160 | DIQMTQSPSSVSASVGDRVTITCRASQGISGWLAWYQQKPGKAPKFLIYAA |
| anti-nectin4 | STLQSGVPSRFSGSGSGTDFTLTISSLQPEDFATYYCQQANSFPPTFGGGTKV |
| antibody | EIKRTVAAPSVFIFPPSDEQLKSGTASVVCLLNNFYPREAKVQWKVDNALQ |
| (enfortumab) - | SGNSQESVTEQDSKDSTYSLSSTLTLSKADYEKHKVYACEVTHQGLSSPVT |
| light chain | KSFNRGEC |
| SEQ ID NO: 161 | QVQLQQWGAGLLKPSETLSLTCAVYGGSFSGYYWSWIRQPPGKGLEWIGE |
| anti-uPAR | INHSGSTNYNPSLKSRVTISVDTSKNQFSLKLSSVTAADTAVYYCARGRRFG |
| antibody (ab1) - | DFDYWGQGTLVTVSSASTKGPSVFPLAPSSKSTSGGTAALGCLVKDYFPEP |
| heavy chain | VTVSWNSGALTSGVHTFPAVLQSSGLYSLSSVVTVPSSSLGTQTYICNVNH |
| | KPSNTKVDKKVEPKSCDKTHTCPPCPAPELLGGPSVFLFPPKPKDTLMISRT |
| | PEVTCVVVDVSHEDPEVKFNWYVDGVEVHNAKTKPREEQYNSTYRVVSV |
| | LTVLHQDWLNGKEYKCKVSNKALPAPIEKTISKAKGQPREPQVYTLPPSRE |
| | EMTKNQVSLTCLVKGFYPSDIAVEWESNGQPENNYKTTPPVLDSDGSFFLY |
| | SKLTVDKSRWQQGNVFSCSVMHEALHNHYTQKSLSLSPGK |
| SEQ ID NO: 162 | QPVLTQPPSVSVAPGKTARITCGGNNIGSKSVHWYQQKPGQAPVLVVYDD |
| anti-uPAR | SDRPPGIPERFSGSNSGNTATLTISRVEAGDEADYYCQVWDSSSDHSPFGTG |
| antibody (ab1) - | TKVTVLGQPKANPTVTLFPPSSEELQANKATLVCLISDFYPGAVTVAWKAD |
| light chain | GSPVKAGVETTKPSKQSNNKYAASSYLSLTPEQWKSHRSYSCQVTHEGST |
| | VEKTVAPTECS |
| SEQ ID NO: 163 | QVQLQQSGPGLVKPSQTLSLTCAISGDSVSSNSAAWNWIRQSPSRGLEWLG |
| anti-uPAR | RTYYRSKWYNDYAVSVKSRIIINPDTSKNQFSLQLNSVTPEDTAVYYCARD |
| antibody (ab2) - | PGGPLDDSFDIWGQGTMVTVSSASTKGPSVFPLAPSSKSTSGGTAALGCLV |
| heavy chain | KDYFPEPVTVSWNSGALTSGVHTFPAVLQSSGLYSLSSVVTVPSSSLGTQTY |
| | ICNVNHKPSNTKVDKKVEPKSCDKTHTCPPCPAPELLGGPSVFLFPPKPKDT |
| | LMISRTPEVTCVVVDVSHEDPEVKFNWYVDGVEVHNAKTKPREEQYNSTY |
| | RVVSVLTVLHQDWLNGKEYKCKVSNKALPAPIEKTISKAKGQPREPQVYT |
| | LPPSREEMTKNQVSLTCLVKGFYPSDIAVEWESNGQPENNYKTTPPVLDSD |
| | GSFFLYSKLTVDKSRWQQGNVFSCSVMHEALHNHYTQKSLSLSPGK |
| SEQ ID NO: 164 | LDVVMTQSPLSLPVTPGEPASISCRSSQSLLRSNGYNYLDWYLQKPGQSPQ |
| anti-uPAR | LLIYLGSIRASGVPDRFSGSGSGTDFTLRISRVEAEDVGVYYCMQALQTPFT |
| antibody (ab2) - | FGQGTKLEIKRTVAAPSVFIFPPSDEQLKSGTASVVCLLNNFYPREAKVQW |
| light chain | KVDNALQSGNSQESVTEQDSKDSTYSLSSTLTLSKADYEKHKVYACEVTH |
| | QGLSSPVTKSFNRGEC |
| SEQ ID NO: 165 | IWNIHGKESCDVQLYIKRQSEHSILAGDPFELECPVKYCANRPHVTWCKLN |
| BTLA ECD (25- | GTTCVKLEDRQTSWKEEKNISFFILHFEPVLPNDNGSYRCSANFQSNLIESHS |
| 150) | TTLYVTDVKSASERPSKDEMAS |
| SEQ ID NO: 166 | KESCDVQLYIKRQSEHSILAGDPFELECPVKYCANRPHVTWCKLNGTTCVK |
| BTLA ECD (31- | LEDRQTSWKEEKNISFFILHFEPVLPNDNGSYRCSANFQSNLIESHSTTLYVT |
| 134) | |
| SEQ ID NO: 167 | KESCDVQLYIKRQSEHSILAGDPFELECPVKYCANRPHVTWCKLNGTTCVK |
| BTLA ECD (31- | LEDRQTSWKEEKNISFFILHFEPVLPNDNGSYRCSANFQSNLIESHSTTLYVT |
| 150) | DVKSASERPSKDEMAS |
| SEQ ID NO: 168 | KESCDVQLYIKRQSEHSILAGDPFELECPVKYCANRPHVTWCKLNGTTCVK |
| BTLA ECD (31- | LEDRQTSWKEEKNISFFILHFEPVLPNDNGSYRCSANFQSNLIESHSTTLYVT |
| 157) | DVKSASERPSKDEMASRPWLLYR |
| SEQ ID NO: 169 | PGWFLDSPDRPWNPPTFSPALLVVTEGDNATFTCSFSNTSESFVLNWYRMS |
| PD1 ECD | PSNQTDKLAAFPEDRSQPGQDCRFRVTQLPNGRDFHMSVVRARRNDSGTY |
| | LCGAISLAPKAQIKESLRAELRVTERRAEVPTAHPSPSPRPAGQFQTLV |
| SEQ ID NO: 170 | DSPDRPWNPPTFSPALLVVTEGDNATFTCSFSNTSESFHVVWHRESPSGQTD |
| PD1 ECD (HAC- | TLAAFPEDRSQPGQDARFRVTQLPNGRDFHMSVVRARRNDSGTYVCGVIS |
| V) | LAPKIQIKESLRAELRVTER |
| SEQ ID NO: 171 | PGWFLDSPDRPWNPPTFSPALLVVTEGDNATFTCSFSNTSESFHVVWHRES |
| PD1 ECD (HAC- | PSGQTDTLAAFPEDRSQPGQDARFRVTQLPNGRDFHMSVVRARRNDSGTY |
| V_extended) | VCGVISLAPKIQIKESLRAELRVTERRAEVPTAHPSPSPRPAGQFQTLV |
| SEQ ID NO: 172 | MDGRFWIRVQESVMVPEGLCISVPCSFSYPRQDWTGSTPAYGYWFKAVTE |
| SIGLEC10 ECD | TTKGAPVATNHQSREVEMSTRGRFQLTGDPAKGNCSLVIRDAQMQDESQY |
| (17-546) | FFRVERGSYVRYNFMNDGFFLKVTALTQKPDVYIPETLEPGQPVTVICVFN |
| | WAFEECPPPSFSWTGAALSSQGTKPTTSHFSVLSFTPRPQDHNTDLTCHVDF |
| | SRKGVSAQRTVRLRVAYAPRDLVISISRDNTPALEPQPQGNVPYLEAQKGQ |
| | FLRLLCAADSQPPATLSWVLQNRVLSSSHPWGPRPLGLELPGVKAGDSGRY |
| | TCRAENRLGSQQRALDLSVQYPPENLRVMVSQANRTVLENLGNGTSLPVL |
| | EGQSLCLVCVTHSSPPARLSWTQRGQVLSPSQPSDPGVLELPRVQVEHEGE |
| | FTCHARHPLGSQHVSLSLSVHYSPKLLGPSCSWEAEGLHCSCSSQASPAPSL |
| | RWWLGEELLEGNSSQDSFEVTPSSAGPWANSSLSLHGGLSSGLRLRCEAW |
| | NVHGAQSGSILQLPDKKGLIST |
| SEQ ID NO: 173 | EEEVQIIQPDKSVSVAAGESAILHCTITSLFPVGPIQWFRGAGPARVLIYNQR |
| SIRPa ECD | QGPFPRVTTISETTRRENMDFSISISNITPADAGTYYCIKFRKGSPDTEFKSGA |
| (FD6) | GTELSVRAKPS |
| SEQ ID NO: 174 | EEELQVIQPDKSVLVAAGETATLRCTATSLIPVGPIQWFRGAGPGRELIYNQ |
| SIRPa ECD (31- | KEGHFPRVTTVSDLTKRNNMDFSIRIGNITPADAGTYYCVKFRKGSPDDVE |
| 150) | FKSGAGTELSVRAKPS |
| SEQ ID NO: 175 | EEELQVIQPDKSVLVAAGETATLRCTATSLIPVGPIQWFRGAGPGRELIYNQ |
| SIRPa ECD (31- | KEGHFPRVTTVSDLTKRNNMDFSIRIGNITPADAGTYYCVKFRKGSPDDVE |
| 373) | FKSGAGTELSVRAKPSAPVVSGPAARATPQHTVSFTCESHGFSPRDITLKWF |
| | KNGNELSDFQTNVDPVGESVSYSIHSTAKVVLTREDVHSQVICEVAHVTLQ |
| | GDPLRGTANLSETIRVPPTLEVTQQPVRAENQVNVTCQVRKFYPQRLQLTW |
| | LENGNVSRTETASTVTENKDGTYNWMSWLLVNVSAHRDDVKLTCQVEHD |
| | GQPAVSKSHDLKVSAHPKEQGSNTAAENTGSNERNIY |
| SEQ ID NO: 176 | EEELQIIQPDKSVLVAAGETATLRCTITSLFPVGPIQWFRGAGPGRVLIYNQR |
| SIRPa ECD | QGPFPRVTTVSDTTKRNNMDFSIRIGNITPADAGTYYCIKFRKGSPDDVEFK |
| (CV1) | SGAGTELSVRAKPS |
| SEQ ID NO: 177 | TIPPHVQKSVNNDMIVTDNNGAVKFPQLCKFCDVRFSTCDNQKSCMSNCSI |
| TGFbR ECD | TSICEKPQEVCVAVWRKNDENITLETVCHDPKLPYHDFILEDAASPKCIMKE |
| (TGFbRII) | KKKPGETFFMCSCSSDECNDNIIFSEEYNTSNPD |
| SEQ ID NO: 178 | IPPHVQKSVNNDMIVTDNNGAVKFPQLCKFCDVRFSTCDNQKSCMSNCSIT |
| TGFbR ECD | SICEKPQEVCVAVWRKNDENITLETVCHDPKLPYHDFILEDAASPKCIMKE |
| (TGFbRII-1) | KKKPGETFFMCSCSSDECNDNIIFSEEYNTSNPD |
| SEQ ID NO: 179 | NGAVKFPQLCKFCDVRFSTCDNQKSCMSNCSITSICEKPQEVCVAVWRKN |
| TGFbR ECD | DENITLETVCHDPKLPYHDFILEDAASPKCIMKEKKKPGETFFMCSCSSDEC |
| (huTGFbRII- | NDNIIFSEEYNTSNPDGLGPVESSPGHGLDTAAAGPEPGALCELSPVSASHP |
| huTGFbRIII- | VQALMESFTVLSGCASRGTTGLPQEVHVLNLRTAGQGPGQLQREVTLHLN |
| huTGFbRII) | PISSVHIHHKSVVFLLNSPHPLVWHLKTERLATGVSRLFLVSEGSVVQFSSA |
| | NFSLTAETEERNFPHGNEHLLNWARKEYGAVTSFTELKIARNIYIKVGEDQ |
| | VFPPKCNIGKNFLSLNYLAEYLQPKAAEGCVMSSQPQNEEVHIIELITPNSNP |
| | YSAFQVDITIDIRPSQEDLEVVKNLILILKCKKSVNWVIKSFDVKGSLKIIAPN |
| | SIGFGKESERSMTMTKSIRDDIPSTQGNLVKWALDNGYSPITSYTMAPVAN |
| | RFHLRLENNAEEMGDEEVHTIPPELRILLDPTCKAQLCKFCDVRFSTCDNQ |
| | KSCMSNCSITSICEKPQEVCVAVWRKNDENITLETVCHDPKLPYHDFILEDA |
| | ASPKCIMKEKKKPGETFFMCSCSSDECNDNIIFSEEYNTSNPD |
| SEQ ID NO: 180 | NGAVKFPQLCKFCDVRFSTCDNQKSCMSNCSITSICEKPQEVCVAVWRKN |
| TGFbR ECD | DENITLETVCHDPKLPYHDFILEDAASPKCIMKEKKKPGETFFMCSCSSDEC |
| (RER) | NDNIIFSEEYNTSNPDGLGPVESSPGHGLDTAAAGPEPSTRCELSPINASHPV |
| | QALMESFTVLSGCASHGTTGLPREVHVLNLRSTDQGPGQRQREVTLHLNPI |
| | ASVHTHHKPIVFLLNSPQPLVWRLKTERLAAGVPRLFLVSEGSVVQFPSGN |
| | FSLTAETEERNFPQENEHLLRWAQKEYGAVTSFTELKIARNIYIKVGEDQVF |
| | PPTCNIGKNFLSLNYLAEYLQPKAAEGCVLPSQPHEKEVHIIELITPSSNPYS |
| | AFQVDIIVDIRPAQEDPEVVKNLVLILKSKKSVNWVIKSFDVKGNLKVIAPN |
| | SIGFGKESERSMTMTKLVRDDIPSTQENLMKWALDAGYRPVTSYTMAPVA |
| | NRFHLRLENNEEMRDEEVHTIPPELRILLDPDKLPQLCKFCDVRFSTCDNQK |
| | SCMSNCSITSICEKPQEVCVAVWRKNDENITLETVCHDPKLPYHDFILEDAA |
| | SPKCIMKEKKKPGETFFMCSCSSDECNDNIIFSEEYNTSNPD |
| SEQ ID NO: 181 | SEVEYRAEVGQNAYLPCFYTPAAPGNLVPVCWGKGACPVFECGNVVLRT |
| TIM3 ECD | DERDVNYWTSRYWLNGDFRKGDVSLTIENVTLADSGIYCCRIQIPGIMNDE |
| | KFNLKLVIKPAKVTPAPTRQRDFTAAFPRMLTTRGHGPAETQTLGSLPDINL |
| | TQISTLANELRDSRLANDLRDSGATIRIG |
| SEQ ID NO: 182 | SEVEYRAEVGQNAYLPCFYTPAAPGNLVPVCWGKGACPVFECGNVVLRT |
| TIM3 ECD | DERDVNYWTSRYWLNGDFRKGDVSLTIENVILADSGIYCCRIQIPGIMNDE |
| (hypoglycosylated | KFNLKLVIKPAKVTPAPTRQRDFTAAFPRMLTTRGHGPAETQTLGSLPDINL |
| TIM3 (T80I, | IQISTLANELRDSRLANDLRDSGATIRIG |
| T153I)) | |
| SEQ ID NO: 183 | SEVEYRAEVGQNAYLPCFYTPAAPGNLVPVCWGKGACPVFECGNVVLRT |
| TIM3 ECD | DERDVNYWTSRYWLNGDFRKGDVSLTIENVILADSGIYCCRIQIPGIMNDE |
| (hypoglycosylated | KFNLKLVIKPAKVTPAPTRQRDFTAAFPRMLTTRGHGPAETQTLGSLPDINL |
| TIM3 (T80I) | TQISTLANELRDSRLANDLRDSGATIRIG |
| SEQ ID NO: 184 | ASVGLPSVSLDLPRLSIQKDILTIKANTTLQITCRGQRDLDWLWPNNQSGSE |
| VEGFR ECD | QRVEVTECSDGLFCKTLTIPKVIGNDTGAYKCFYRETDLASVIYVYVQDYR |
| (VEGFR2) | SPFIASVSDQHGVVYITENKNKTVVIPCLGSISNLNVSLCARYPEKRFVPDG |
| | NRISWDSKKGFTIPSYMISYAGMVFCEAKINDESYQSIMYIVVVVGYRIYDV |
| | VLSPSHGIELSVGEKLVLNCTARTELNVGIDFNWEYPSSKHQHKKLVNRDL |
| | KTQSGSEMKKFLSTLTIDGVTRSDQGLYTCAASSGLMTKKNSTFVRVHEKP |
| | FVAFGSGMESLVEATVGERVRIPAKYLGYPPPEIKWYKNGIPLESNHTIKAG |
| | HVLTIMEVSERDTGNYTVILTNPISKEKQSHVVSLVVYVPPQIGEKSLISPVD |
| | SYQYGTTQTLTCTVYAIPPPHHIHWYWQLEEECANEPSQAVSVTNPYPCEE |
| | WRSVEDFQGGNKIEVNKNQFALIEGKNKTVSTLVIQAANVSALYKCEAVN |
| | KVGRGERVISFHVTRGPEITLQPDMQPTEQESVSLWCTADRSTFENLTWYK |
| | LGPQPLPIHVGELPTPVCKNLDTLWKLNATMFSNSTNDILIMELKNASLQD |
| | QGDYVCLAQDRKTKKRHCVVRQLTVLERVAPTITGNLENQTTSIGESIEVS |
| | CTASGNPPPQIMWFKDNETLVEDSGIVLKDGNRNLTIRRVRKEDEGLYTCQ |
| | ACSVLGCAKVEAFFIIEGAQEKTNLE |
| SEQ ID NO: 185 | SKLKDPELSLKGTQHIMQAGQTLHLQCRGEAAHKWSLPEMVSKESERLSIT |
| VEGFR ECD | KSACGRNGKQFCSTLTLNTAQANHTGFYSCKYLAVPTSKKKETESAIYIFIS |
| (VEGFR1) | DTGRPFVEMYSEIPEIIHMTEGRELVIPCRVTSPNITVTLKKFPLDTLIPDGKR |
| | IIWDSRKGFIISNATYKEIGLLTCEATVNGHLYKTNYLTHRQTNTIIDVQISTP |
| | RPVKLLRGHTLVLNCTAFIPLNTRVQMTWSYPDEKNKRASVRRRIDQSNS |
| | HANIFYSVLTIDKMQNKDKGLYTCRVRSGPSFKSVNTSVHIYDKAFITVKH |
| | RKQQVLETVAGKRSYRLSMKVKAFPSPEVVWLKDGLPATEKSARYLTRG |
| | YSLIIKDVTEEDAGNYTILLSIKQSNVFKNLTATLIVNVKPQIYEKAVSSFPD |
| | PALYPLGSRQILTCTAYGIPQPTIKWFWHPCNHNHSEARCDFCSNNEESFIL |
| | DADSNMGNRIESITQRMAIIEGKNKMASTLVVADSRISGIYICIASNKVGTV |
| | GRNISFYITDVPNGFHVNLEKMPTEGEDLKLSCTVNKFLYRDVTWILLRTV |
| | NNRTMHYSISKQKMAITKEHSITLNLTIMNVSLQDSGTYACRARNVYTGEE |
| | ILQKKEITIRDQEAPYLLRNLSDHTVAISSSTTLDCHANGVPEPQITWFKNNH |
| | KIQQEPGIILGPGSSTLFIERVTEEDEGVYHCKATNQKGSVESSAYLTVQGTS |
| | DKSNLE |
| SEQ ID NO: 186 | SDTGRPFVEMYSEIPEIIHMTEGRELVIPCRVTSPNITVTLKKFPLDTLIPDGK |
| VEGFR ECD | RIIWDSRKGFIISNATYKEIGLLTCEATVNGHLYKTNYLTHRQTNTIIDVVLS |
| (aflibercept) | PSHGIELSVGEKLVLNCTARTELNVGIDFNWEYPSSKHQHKKLVNRDLKTQ |
| | SGSEMKKFLSTLTIDGVTRSDQGLYTCAASSGLMTKKNSTFVRVHEK |
| SEQ ID NO: 187 | EKATKRNDEECEVQLNIKRNSKHSAWTGELFKIECPVKYCVHRPNVTWCK |
| mBTLA ECD | HNGTIWVPLEVGPQLYTSWEENRSVPVFVLHFKPIHLSDNGSYSCSTNFNS |
| (30-176) | QVINSHSVTIHVRERTQNSSEHPLIISDIPDATNASGPSTMEKRPG |
| SEQ ID NO: 188 | ACPWAVSGARASPGSAASPRLREGPELSPDDPAGLLDLRQGMFAQLVAQN |
| 41BBL ECD (50- | VLLIDGPLSWYSDPGLAGVSLTGGLSYKEDTKELVVAKAGVYYVFFQLEL |
| 254) | RRVVAGEGSGSVSLALHLQPLRSAAGAAALALTVDLPPASSEARNSAFGFQ |
| | GRLLHLSAGQRLGVHLHTEARARHAWQLTQGATVLGLFRVTPEIPAGLPSP |
| | RSE |
| SEQ ID NO: 189 | QRTDSIPNSPDNVPLKGGNCSEDLLCILKRAPFKKSWAYLQVAKHLNKTKL |
| CD30L ECD (63- | SWNKDGILHGVRYQDGNLVIQFPGLYFIICQLQFLVQCPNNSVDLKLELLIN |
| 234) | KHIKKQALVTVCESGMQTKHVYQNLSQFLLDYLQVNTTISVNVDTFQYIDT |
| | STFPLENVLSIFLYSNSD |
| SEQ ID NO: 190 | HRRLDKIEDERNLHEDFVFMKTIQRCNTGERSLSLLNCEEIKSQFEGFVKDI |
| CD40L ECD (47- | MLNKEETKKENSFEMQKGDQNPQIAAHVISEASSKTTSVLQWAEKGYYTM |
| 261) | SNNLVTLENGKQLTVKRQGLYYIYAQVTFCSNREASSQAPFIASLCLKSPGR |
| | FERILLRAANTHSSAKPCGQQSIHLGGVFELQPGASVFVNVTDPSQVSHGTG |
| | FTSFGLLKL |
| SEQ ID NO: 191 | GDQNPQIAAHVISEASSKTTSVLQWAEKGYYTMSNNLVTLENGKQLTVKR |
| CD40L ECD | QGLYYIYAQVTFCSNREASSQAPFIASLCLKSPGRFERILLRAANTHSSAKPC |
| (116-261) | GQQSIHLGGVFELQPGASVFVNVTDPSQVSHGTGFTSFGLLKL |
| SEQ ID NO: 192 | QRFAQAQQQLPLESLGWDVAELQLNHTGPQQDPRLYWQGGPALGRSFLH |
| CD70 ECD (39- | GPELDKGQLRIHRDGIYMVHIQVTLAICSSTTASRHHPTTLAVGICSPASRSI |
| 193) | SLLRLSFHQGCTIASQRLTPLARGDTLCTNLTGTLLPSRNTDETFFGVQWVR |
| | P |
| SEQ ID NO: 193 | QLETAKEPCMAKFGPLPSKWQMASSEPPCVNKVSDWKLEILQNGLYLIYG |
| GITRL ECD (72- | QVAPNANYNDVAPFEVRLYKNKDMIQTLTNKSKIQNVGGTYELHVGDTID |
| 199) | LIFNSEHQVLKNNTYWGIILLANPQFIS |
| SEQ ID NO: 194 | DTQEKEVRAMVGSDVELSCACPEGSRFDLNDVYVYWQTSESKTVVTYHIP |
| ICOSL ECD (19- | QNSSLENVDSRYRNRALMSPAGMLRGDFSLRLFNVTPQDEQKFHCLVLSQ |
| 258) | SLGFQEVLSVEVTLHVAANFSVPVVSAPHSPSQDELTFTCTSINGYPRPNVY |
| | WINKTDNSLLDQALQNDTVFLNMRGLYDVVSVLRIARTPSVNIGCCIENVL |
| | LQQNLTVGSQTGNDIGERDKITENPVSTGEKNAATWS |
| SEQ ID NO: 195 | IWELKKDVYVVELDWYPDAPGEMVVLTCDTPEEDGITWTLDQSSEVLGSG |
| IL12 ECD (p40- | KTLTIQVKEFGDAGQYTCHKGGEVLSHSLLLLHKKEDGIWSTDILKDQKEP |
| p35) | KNKTFLRCEAKNYSGRFTCWWLTTISTDLTFSVKSSRGSSDPQGVTCGAAT |
| | LSAERVRGDNKEYEYSVECQEDSACPAAEESLPIEVMVDAVHKLKYENYT |
| | SSFFIRDIIKPDPPKNLQLKPLKNSRQVEVSWEYPDTWSTPHSYFSLTFCVQV |
| | QGKSKREKKDRVFTDKTSATVICRKNASISVRAQDRYYSSSWSEWASVPCS |
| | GGGGSGGGGSGGGGSRNLPVATPDPGMFPCLHHSQNLLRAVSNMLQKAR |
| | QTLEFYPCTSEEIDHEDITKDKTSTVEACLPLELTKNESCLNSRETSFITNGSC |
| | LASRKTSFMNIALCLSSIYEDLKMYQVEFKTMNAKLLMDPKRQIFLDQNML |
| | AVIDELMQALNFNSETVPQKSSLEEPDFYKTKIKLCILLHAFRIRAVTIDRV |
| | MSYLNAS |
| SEQ ID NO: 196 | NWVNVISDLKKIEDLIQSMHIDATLYTESDVHPSCKVTAMKCFLLELQVISL |
| IL15 ECD (49- | ESGDASIHDTVENLIILANNSLSSNGNVTESGCKECEELEEKNIKEFLQSFVH |
| 162) | IVQMFINTS |
| SEQ ID NO: 197 | LQLHWRLGEMVTRLPDGPAGSWEQLIQERRSHEVNPAAHLTGANSSLTGS |
| (LIGHT ECD (59- | GGPLLWETQLGLAFLRGLSYHDGALVVTKAGYYYIYSKVQLGGVGCPLGL |
| 240) | ASTITHGLYKRTPRYPEELELLVSQQSPCGRATSSSRVWWDSSFLGGVVHL |
| | EAGEKVVVRVLDERLVRLRDGTRSYFGAFMV |
| SEQ ID NO: 198 | DGPAGSWEQLIQERRSHEVNPAAHLTGANSSLTGSGGPLLWETQLGLAFLR |
| LIGHT ECD (74- | GLSYHDGALVVTKAGYYYIYSKVQLGGVGCPLGLASTITHGLYKRTPRYP |
| 240) | EELELLVSQQSPCGRATSSSRVWWDSSFLGGVVHLEAGEKVVVRVLDERL |
| | VRLRDGTRSYFGAFMV |
| SEQ ID NO: 199 | QVSHRYPRIQSIKVQFTEYKKEKGFILTSQKEDEIMKVQNNSVIINCDGFYLI |
| OX40L ECD (51- | SLKGYFSQEVNISLHYQKDEEPLFQLKKVRSVNSLMVASLTYKDKVYLNV |
| 183) | TTDNTSLDDFHVNGGELILIHQNPGEFCVL |
| SEQ ID NO: 200 | GGGGSGGGGSGGGGS |
| flexible linker - | |
| (GGGGS)3 | |
| SEQ ID NO: 201 | GGGGSGGGGSGGGGSGGGGS |
| flexible linker - | |
| (GGGGS)4 | |
| SEQ ID NO: 202 | GSAGSAAGSGEF |
| flexible linker - | |
| waldo 1999 | |
| SEQ ID NO: 203 | KESGSVSSEQLAQFRSLD |
| flexible linker - | |
| bird1988-1 | |
| SEQ ID NO: 204 | EGKSSGSGSESKST |
| flexible linker - | |
| bird1988-2 | |
| SEQ ID NO: 205 | EAAAKEAAAKEAAAK |
| rigid linker - | |
| (EAAAK)3 | |
| SEQ ID NO: 206 | AEAAAKEAAAKEAAAKA |
| rigid linker - | |
| A(EAAAK)3 A | |
| SEQ ID NO: 207 | APAPAPAPAPAPAP |
| rigid linker - | |
| (AP)7 | |
| SEQ ID NO: 208 | ASTKGPSVFPLAPSSKSTSGGTAALGCLVKDYFPEPVTVSWNSGALTSGVH |
| HC constant | TFPAVLQSSGLYSLSSVVTVPSSSLGTQTYICNVNHKPSNTKVDKKVEPKSC |
| region - IgG1 | DKTHTCPPCPAPELLGGPSVFLFPPKPKDTLMISRTPEVTCVVVDVSHEDPE |
| | VKFNWYVDGVEVHNAKTKPREEQYNSTYRVVSVLTVLHQDWLNGKEYK |
| | CKVSNKALPAPIEKTISKAKGQPREPQVYTLPPSREEMTKNQVSLTCLVKGF |
| | YPSDIAVEWESNGQPENNYKTTPPVLDSDGSFFLYSKLTVDKSRWQQGNV |
| | FSCSVMHEALHNHYTQKSLSLSPGK |
| SEQ ID NO: 209 | ASTKGPSVFPLAPSSKSTSGGTAALGCLVKDYFPEPVTVSWNSGALTSGVH |
| HC constant | TFPAVLQSSGLYSLSSVVTVPSSSLGTQTYICNVNHKPSNTKVDKKVEPKSC |
| region - | DKTHTCPPCPAPEAAGGPSVFLFPPKPKDTLMISRTPEVTCVVVDVSHEDPE |
| IgG1_L234A_L23 | VKFNWYVDGVEVHNAKTKPREEQYNSTYRVVSVLTVLHQDWLNGKEYK |
| 5A | CKVSNKALPAPIEKTISKAKGQPREPQVYTLPPSREEMTKNQVSLTCLVKGF |
| | YPSDIAVEWESNGQPENNYKTTPPVLDSDGSFFLYSKLTVDKSRWQQGNV |
| | FSCSVMHEALHNHYTQKSLSLSPGK |
| SEQ ID NO: 210 | ASTKGPSVFPLAPCSRSTSESTAALGCLVKDYFPEPVTVSWNSGALTSGVHT |
| HC constant | FPAVLQSSGLYSLSSVVTVPSSSLGTKTYTCNVDHKPSNTKVDKRVESKYG |
| region - IgG4 | PPCPSCPAPEFLGGPSVFLFPPKPKDTLMISRTPEVTCVVVDVSQEDPEVQFN |
| | WYVDGVEVHNAKTKPREEQFNSTYRVVSVLTVLHQDWLNGKEYKCKVS |
| | NKGLPSSIEKTISKAKGQPREPQVYTLPPSQEEMTKNQVSLTCLVKGFYPSD |
| | IAVEWESNGQPENNYKTTPPVLDSDGSFFLYSRLTVDKSRWQEGNVFSCSV |
| | MHEALHNHYTQKSLSLSLGK |
| SEQ ID NO: 211 | ASTKGPSVFPLAPCSRSTSESTAALGCLVKDYFPEPVTVSWNSGALTSGVHT |
| HC constant | FPAVLQSSGLYSLSSVVTVPSSSLGTKTYTCNVDHKPSNTKVDKRVESKYG |
| region - | PPCPPCPAPEFLGGPSVFLFPPKPKDTLMISRTPEVTCVVVDVSQEDPEVQFN |
| IgG4_S228P | WYVDGVEVHNAKTKPREEQFNSTYRVVSVLTVLHQDWLNGKEYKCKVS |
| | NKGLPSSIEKTISKAKGQPREPQVYTLPPSQEEMTKNQVSLTCLVKGFYPSD |
| | IAVEWESNGQPENNYKTTPPVLDSDGSFFLYSRLTVDKSRWQQGNVFSCSV |
| | MHEALHNHYTQKSLSLSGK |
| SEQ ID NO: 212 | RTVAAPSVFIFPPSDEQLKSGTASVVCLLNNFYPREAKVQWKVDNALQSGN |
| LC constant | SQESVTEQDSKDSTYSLSSTLTLSKADYEKHKVYACEVTHQGLSSPVTKSF |
| region - kappa | NRGEC |
| SEQ ID NO: 213 | QPKAAPSVTLFPPSSEELQANKATLVCLISDFYPGAVTVAWKADSSPVKAG |
| LC constant | VETTTPSKQSNNKYAASSYLSLTPEQWKSHRSYSCQVTHEGSTVEKTVAPT |
| region - lambda | ECS |
| SEQ ID NO: 214 | DIQLTQSPASLAVSLGQRATISCKASQSVDYDGDSYLNWYQQIPGQPPKLLI |
| anti-CD3/CD19 | YDASNLVSGIPPRFSGSGSGTDFTLNIHPVEKVDAATYHCQQSTEDPWTFG |
| BiTE | GGTKLEIKGGGGSGGGGSGGGGSQVQLQQSGAELVRPGSSVKISCKASGY |
| (blinatumomab) | AFSSYWMNWVKQRPGQGLEWIGQIWPGDGDTNYNGKFKGKATLTADESS |
| | STAYMQLSSLASEDSAVYFCARRETTTVGRYYYAMDYWGQGTTVTVSSG |
| | GGGSDIKLQQSGAELARPGASVKMSCKTSGYTFTRYTMHWVKQRPGQGL |
| | EWIGYINPSRGYTNYNQKFKDKATLTTDKSSSTAYMQLSSLTSEDSAVYYC |
| | ARYYDDHYCLDYWGQGTTLTVSSVEGGSGGSGGSGGSGGVDDIQLTQSPA |
| | IMSASPGEKVTMTCRASSSVSYMNWYQQKSGTSPKRWIYDTSKVASGVPY |
| | RFSGSGSGTSYSLTISSMEAEDAATYYCQQWSSNPLTFGAGTKLELKHHHH |
| | HH |
| SEQ ID NO: 215 | QVQLVESGGGLVKPGESLRLSCAASGFTFSDYYMYWVRQAPGKGLEWVA |
| anti-CD3/PSMA | IISDGGYYTYYSDIIKGRFTISRDNAKNSLYLQMNSLKAEDTAVYYCARGFP |
| BiTE | LLRHGAMDYWGQGTLVTVSSGGGGSGGGGSGGGGSDIQMTQSPSSLSASV |
| (pasotuxizumab) | GDRVTITCKASQNVDTNVAWYQQKPGQAPKSLIYSASYRYSDVPSRFSGSA |
| | SGTDFTLTISSVQSEDFATYYCQQYDSYPYTFGGGTKLEIKSGGGGSEVQLV |
| | ESGGGLVQPGGSLKLSCAASGFTFNKYAMNWVRQAPGKGLEWVARIRSK |
| | YNNYATYYADSVKDRFTISRDDSKNTAYLQMNNLKTEDTAVYYCVRHGN |
| | FGNSYISYWAYWGQGTLVTVSSGGGGSGGGGSGGGGSQTVVTQEPSLTVS |
| | PGGTVTLTCGSSTGAVTSGNYPNWVQQKPGQAPRGLIGGTKFLAPGTPARF |
| | SGSLLGGKAALTLSGVQPEDEAEYYCVLWYSNRWVFGGGTKLTVLHHHH |
| | HH |
| SEQ ID NO: 216 | QVQLVQSGAEVKKPGASVKVSCKASGYTFTEFGMNWVRQAPGQGLEWM |
| anti- | GWINTKTGEATYVEEFKGRVTFTTDTSTSTAYMELRSLRSDDTAVYYCAR |
| CEACAM5/CD3 | WDFAYYVEAMDYWGQGTTVTVSSASTKGPSVFPLAPSSKSTSGGTAALGC |
| CrossMab | LVKDYFPEPVTVSWNSGALTSGVHTFPAVLQSSGLYSLSSVVTVPSSSLGTQ |
| (cibisatamab) - | TYICNVNHKPSNTKVDKKVEPKSCDKTHTCPPCPAPEAAGGPSVFLFPPKP |
| HC1 | KDTLMISRTPEVTCVVVDVSHEDPEVKFNWYVDGVEVHNAKTKPREEQY |
| | NSTYRVVSVLTVLHQDWLNGKEYKCKVSNKALGAPIEKTISKAKGQPREP |
| | QVCTLPPSRDELTKNQVSLSCAVKGFYPSDIAVEWESNGQPENNYKTTPPV |
| | LDSDGSFFLVSKLTVDKSRWQQGNVFSCSVMHEALHNHYTQKSLSLSPGK |
| SEQ ID NO: 217 | QVQLVQSGAEVKKPGASVKVSCKASGYTFTEFGMNWVRQAPGQGLEWM |
| anti- | GWINTKTGEATYVEEFKGRVTFTTDTSTSTAYMELRSLRSDDTAVYYCAR |
| CEACAM5/CD3 | WDFAYYVEAMDYWGQGTTVTVSSASTKGPSVFPLAPSSKSTSGGTAALGC |
| CrossMab | LVKDYFPEPVTVSWNSGALTSGVHTFPAVLQSSGLYSLSSVVTVPSSSLGTQ |
| (cibisatamab) - | TYICNVNHKPSNTKVDKKVEPKSCDGGGGSGGGGSEVQLLESGGGLVQPG |
| HC2 | GSLRLSCAASGFTFSTYAMNWVRQAPGKGLEWVSRIRSKYNNYATYYADS |
| | VKGRFTISRDDSKNTLYLQMNSLRAEDTAVYYCVRHGNFGNSYVSWFAY |
| | WGQGTLVTVSSASVAAPSVFIFPPSDEQLKSGTASVVCLLNNFYPREAKVQ |
| | WKVDNALQSGNSQESVTEQDSKDSTYSLSSTLTLSKADYEKHKVYACEVT |
| | HQGLSSPVTKSFNRGECDKTHTCPPCPAPEAAGGPSVFLFPPKPKDTLMISR |
| | TPEVTCVVVDVSHEDPEVKFNWYVDGVEVHNAKTKPREEQYNSTYRVVS |
| | VLTVLHQDWLNGKEYKCKVSNKALGAPIEKTISKAKGQPREPQVYTLPPC |
| | RDELTKNQVSLWCLVKGFYPSDIAVEWESNGQPENNYKTTPPVLDSDGSFF |
| | LYSKLTVDKSRWQQGNVFSCSVMHEALHNHYTQKSLSLSPGK |
| SEQ ID NO: 218 | DIQMTQSPSSLSASVGDRVTITCKASAAVGTYVAWYQQKPGKAPKLLIYSA |
| anti- | SYRKRGVPSRFSGSGSGTDFTLTISSLQPEDFATYYCHQYYTYPLFTFGQGT |
| CEACAM5/CD3 | KLEIKRTVAAPSVFIFPPSDEQLKSGTASVVCLLNNFYPREAKVQWKVDNA |
| CrossMab | LQSGNSQESVTEQDSKDSTYSLSSTLTLSKADYEKHKVYACEVTHQGLSSP |
| (cibisatamab) - | VTKSFNRGEC |
| LC1 | |
| SEQ ID NO: 219 | QAVVTQEPSLTVSPGGTVTLTCGSSTGAVTTSNYANWVQEKPGQAFRGLIG |
| anti- | GTNKRAPGTPARFSGSLLGGKAALTLSGAQPEDEAEYYCALWYSNLWVFG |
| CEACAM5/CD3 | GGTKLTVLSSASTKGPSVFPLAPSSKSTSGGTAALGCLVKDYFPEPVTVSW |
| CrossMab | NSGALTSGVHTFPAVLQSSGLYSLSSVVTVPSSSLGTQTYICNVNHKPSNTK |
| (cibisatamab) - | VDKKVEPKSC |
| LC2 | |
| SEQ ID NO: 220 | QVQLKQSGPGLVQPSQSLSITCTVSGFSLTNYGVHWVRQSPGKGLEWLGVI |
| anti-EGFR | WSGGNTDYNTPFTSRLSINKDNSKSQVFFKMNSLQSNDTAIYYCARALTYY |
| fused to BTLA | DYEFAYWGQGTLVTVSAASTKGPSVFPLAPSSKSTSGGTAALGCLVKDYFP |
| ECD | EPVTVSWNSGALTSGVHTFYAVLQSSGLYSLSSVVTVPSSSLGTQTYICNVN |
| | HKPSNTKVDKRVEPKSCDKTHTCPPCPAPELLGGPSVFLFPPKPKDTLMISR |
| | HCTPEVTCVVVDVSHEDPEVKFNWYVDGVEVHNAKTKPREEQYNSTYRVVS |
| | VLTVLHQDWLNGKEYKCKVSNKALPAPIEKTISKAKGQPREPQVYTLPPSR |
| | DELTKNQVSLTCLVKGFYPSDIAVEWESNGQPENNYKTTPPVLDSDGSFFL |
| | YSKLTVDKSRWQQGNVFSCSVMHEALHNHYTQKSLSLSPGKGGGGSGGG |
| | GSGGGGSKESCDVQLYIKRQSEHSILAGDPFELECPVKYCANRPHVTWCKL |
| | NGTTCVKLEDRQTSWKEEKNISFFILHEEPVLPNDNGSYRCSANFQSNLIES |
| | HSTTLYVTDVKSASERPSKDEMAS |
| SEQ ID NO: 221 | DILLTQSPVILSVSPGERVSFSCRASQSIGTNIHWYQQRTNGSPRLLIKYASES |
| anti-EGFR LC | ISGIPSRFSGSGSGTDFTLSINSVESEDIADYYCQQNNNWPTTFGAGTKLELK |
| fused to PD1 ECD | RTVAAPSVFIFPPSDEQLKSGTASVVCLLNNFYPREAKVQWKVDNALQSGN |
| | SQESVTEQDSKDSTYSLSSTLTLSKADYEKHKVYACEVTHQGLSSPVTKSF |
| | NRGECGGGGSGGGGSGGGGSPGWFLDSPDRPWNPPTFSPALLVVTEGDNA |
| | TFTCSFSNTSESFVLNWYRMSPSNQTDKLAAFPEDRSQPGQDCRFRVTQLP |
| | NGRDFHMSVVRARRNDSGTYLCGAISLAPKAQIKESLRAELRVTERRAEVP |
| | TAHPSPSPRPAGQFQTLV |
| SEQ ID NO: 222 | DILLTQSPVILSVSPGERVSFSCRASQSIGTNIHWYQQRTNGSPRLLIKYASES |
| anti-EGFR LC | ISGIPSRFSGSGSGTDFTLSINSVESEDIADYYCQQNNNWPTTFGAGTKLELK |
| fused to | RTVAAPSVFIFPPSDEQLKSGTASVVCLLNNFYPREAKVQWKVDNALQSGN |
| SIGLEC10 ECD | SQESVTEQDSKDSTYSLSSTLTLSKADYEKHKVYACEVTHQGLSSPVTKSF |
| | NRGECGGGGSGGGGSGGGGSMDGRFWIRVQESVMVPEGLCISVPCSFSYP |
| | RQDWTGSTPAYGYWFKAVTETTKGAPVATNHQSREVEMSTRGRFQLTGD |
| | PAKGNCSLVIRDAQMQDESQYFFRVERGSYVRYNFMNDGFFLKVTALTQK |
| | PDVYIPETLEPGQPVTVICVFNWAFEECPPPSFSWTGAALSSQGTKPTTSHFS |
| | VLSFTPRPQDHNTDLTCHVDFSRKGVSAQRTVRLRVAYAPRDLVISISRDN |
| | TPALEPQPQGNVPYLEAQKGQFLRLLCAADSQPPATLSWVLQNRVLSSSHP |
| | WGPRPLGLELPGVKAGDSGRYTCRAENRLGSQQRALDLSVQYPPENLRVM |
| | VSQANRTVLENLGNGTSLPVLEGQSLCLVCVTHSSPPARLSWTQRGQVLSP |
| | SQPSDPGVLELPRVQVEHEGEFTCHARHPLGSQHVSLSLSVHYSPKLLGPSC |
| | SWEAEGLHCSCSSQASPAPSLRWWLGEELLEGNSSQDSFEVTPSSAGPWAN |
| | SSLSLHGGLSSGLRLRCEAWNVHGAQSGSILQLPDKKGLIST |
| SEQ ID NO: 223 | DILLTQSPVILSVSPGERVSFSCRASQSIGTNIHWYQQRTNGSPRLLIKYASES |
| anti-EGFR LC | ISGIPSRFSGSGSGTDFTLSINSVESEDIADYYCQQNNNWPTTFGAGTKLELK |
| fused to SIRPa | RTVAAPSVFIFPPSDEQLKSGTASVVCLLNNFYPREAKVQWKVDNALQSGN |
| ECD | SQESVTEQDSKDSTYSLSSTLTLSKADYEKHKVYACEVTHQGLSSPVTKSF |
| | NRGECGGGGSGGGGSGGGGSEEELQVIQPDKSVLVAAGETATLRCTATSLI |
| | PVGPIQWFRGAGPGRELIYNQKEGHFPRVTTVSDLTKRNNMDFSIRIGNITP |
| | ADAGTYYCVKFRKGSPDDVEFKSGAGTELSVRAKPS |
| SEQ ID NO: 224 | DILLTQSPVILSVSPGERVSFSCRASQSIGTNIHWYQQRTNGSPRLLIKYASES |
| anti-EGFR LC | ISGIPSRFSGSGSGTDFTLSINSVESEDIADYYCQQNNNWPTTFGAGTKLELK |
| fused to TIM3 | RTVAAPSVFIFPPSDEQLKSGTASVVCLLNNFYPREAKVQWKVDNALQSGN |
| ECD | SQESVTEQDSKDSTYSLSSTLTLSKADYEKHKVYACEVTHQGLSSPVTKSF |
| | NRGECGGGGSGGGGSGGGGSSEVEYRAEVGQNAYLPCFYTPAAPGNLVPV |
| | CWGKGACPVFECGNVVLRTDERDVNYWTSRYWLNGDFRKGDVSLTIENV |
| | TLADSGIYCCRIQIPGIMNDEKFNLKLVIKPAKVTPAPTRQRDFTAAFPRML |
| | TTRGHGPAETQTLGSLPDINLTQISTLANELRDSRLANDLRDSGATIRIG |
| SEQ ID NO: 225 | QVQLKQSGPGLVQPSQSLSITCTVSGFSLTNYGVHWVRQSPGKGLEWLGVI |
| anti-EGFR HC | WSGGNTDYNTPFTSRLSINKDNSKSQVFFKMNSLQSNDTAIYYCARALTYY |
| fused to PD1 ECD | DYEFAYWGQGTLVTVSAASTKGPSVFPLAPSSKSTSGGTAALGCLVKDYFP |
| | EPVTVSWNSGALTSGVHIFPAVLQSSGLYSLSSVVTVPSSSLGTQTYICNVN |
| | HKPSNTKVDKRVEPKSCDKTHTCPPCPAPELLGGPSVFLFPPKPKDTLMISR |
| | TPEVTCVVVDVSHEDPEVKFNWYVDGVEVHNAKTKPREEQYNSTYRVVS |
| | VLTVLHQDWLNGKEYKCKVSNKALPAPIEKTISKAKGQPREPQVYTLPPSR |
| | DELTKNQVSLTCLVKGFYPSDIAVEWESNGQPENNYKTTPPVLDSDGSFFL |
| | YSKLTVDKSRWQQGNVFSCSVMHEALHNHYTQKSLSLSPGKGGGGSGGG |
| | GSGGGGSPGWFLDSPDRPWNPPTFSPALLVVTEGDNATFTCSFSNTSESFVL |
| | NWYRMSPSNQTDKLAAFPEDRSQPGQDCRFRVTQLPNGRDFHMSVVRAR |
| | RNDSGTYLCGAISLAPKAQIKESLRAELRVTERRAEVPTAHPSPSPRPAGQF |
| | QTLV |
| SEQ ID NO: 226 | DILLTQSPVILSVSPGERVSFSCRASQSIGTNIHWYQQRTNGSPRLLIKYASES |
| anti-EGFR LC | ISGIPSRFSGSGSGTDFTLSINSVESEDIADYYCQQNNNWPTTFGAGTKLELK |
| fused to BTLA | RTVAAPSVFIFPPSDEQLKSGTASVVCLLNNFYPREAKVQWKVDNALQSGN |
| ECD | SQESVTEQDSKDSTYSLSSTLTLSKADYEKHKVYACEVTHQGLSSPVTKSF |
| | NRGECGGGGSGGGGSGGGGSKESCDVQLYIKRQSEHSILAGDPFELECPVK |
| | YCANRPHVTWCKLNGTTCVKLEDRQTSWKEEKNISFFILHEEPVLPNDNGS |
| | YRCSANFQSNLIESHSTTLYVTDVKSASERPSKDEMAS |
| SEQ ID NO: 227 | QVQLKQSGPGLVQPSQSLSITCTVSGFSLTNYGVHWVRQSPGKGLEWLGVI |
| anti-EGFR HC | WSGGNTDYNTPFTSRLSINKDNSKSQVFFKMNSLQSNDTAIYYCARALTYY |
| fused to | DYEFAYWGQGTLVTVSAASTKGPSVFPLAPSSKSTSGGTAALGCLVKDYFP |
| SIGLEC10 ECD | EPVTVSWNSGALTSGVHIFPAVLQSSGLYSLSSVVTVPSSSLGTQTYICNVN |
| | HKPSNTKVDKRVEPKSCDKTHTCPPCPAPELLGGPSVFLFPPKPKDTLMISR |
| | TPEVTCVVVDVSHEDPEVKFNWYVDGVEVHNAKTKPREEQYNSTYRVVS |
| | VLTVLHQDWLNGKEYKCKVSNKALPAPIEKTISKAKGQPREPQVYTLPPSR |
| | DELTKNQVSLTCLVKGFYPSDIAVEWESNGQPENNYKTTPPVLDSDGSFFL |
| | YSKLTVDKSRWQQGNVFSCSVMHEALHNHYTQKSLSLSPGKGGGGSGGG |
| | GSGGGGSMDGRFWIRVQESVMVPEGLCISVPCSFSYPRQDWTGSTPAYGY |
| | WFKAVTETTKGAPVATNHQSREVEMSTRGRFQLTGDPAKGNCSLVIRDAQ |
| | MQDESQYFFRVERGSYVRYNFMNDGFFLKVTALTQKPDVYIPETLEPGQP |
| | VTVICVFNWAFEECPPPSFSWTGAALSSQGTKPTTSHFSVLSFTPRPQDHNT |
| | DLTCHVDFSRKGVSAQRTVRLRVAYAPRDLVISISRDNTPALEPQPQGNVP |
| | YLEAQKGQFLRLLCAADSQPPATLSWVLQNRVLSSSHPWGPRPLGLELPGV |
| | KAGDSGRYTCRAENRLGSQQRALDLSVQYPPENLRVMVSQANRTVLENL |
| | GNGTSLPVLEGQSLCLVCVTHSSPPARLSWTQRGQVLSPSQPSDPGVLELPR |
| | VQVEHEGEFTCHARHPLGSQHVSLSLSVHYSPKLLGPSCSWEAEGLHCSCS |
| | SQASPAPSLRWWLGEELLEGNSSQDSFEVTPSSAGPWANSSLSLHGGLSSG |
| | LRLRCEAWNVHGAQSGSILQLPDKKGLIST |
| SEQ ID NO: 228 | QVQLKQSGPGLVQPSQSLSITCTVSGFSLTNYGVHWVRQSPGKGLEWLGVI |
| anti-EGFR HC | WSGGNTDYNTPFTSRLSINKDNSKSQVFFKMNSLQSNDTAIYYCARALTYY |
| fused to SIRPa | DYEFAYWGQGTLVTVSAASTKGPSVFPLAPSSKSTSGGTAALGCLVKDYFP |
| ECD | EPVTVSWNSGALTSGVHIFPAVLQSSGLYSLSSVVTVPSSSLGTQTYICNVN |
| | HKPSNTKVDKRVEPKSCDKTHTCPPCPAPELLGGPSVFLFPPKPKDTLMISR |
| | TPEVTCVVVDVSHEDPEVKFNWYVDGVEVHNAKTKPREEQYNSTYRVVS |
| | VLTVLHQDWLNGKEYKCKVSNKALPAPIEKTISKAKGQPREPQVYTLPPSR |
| | DELTKNQVSLTCLVKGFYPSDIAVEWESNGQPENNYKTTPPVLDSDGSFFL |
| | YSKLTVDKSRWQQGNVFSCSVMHEALHNHYTQKSLSLSPGKGGGGSGGG |
| | GSGGGGSEEELQVIQPDKSVLVAAGETATLRCTATSLIPVGPIQWFRGAGPG |
| | RELIYNQKEGHFPRVTTVSDLTKRNNMDFSIRIGNITPADAGTYYCVKFRK |
| | GSPDDVEFKSGAGTELSVRAKPS |
| SEQ ID NO: 229 | QVQLKQSGPGLVQPSQSLSITCTVSGFSLTNYGVHWVRQSPGKGLEWLGVI |
| anti-EGFR HC | WSGGNTDYNTPFTSRLSINKDNSKSQVFFKMNSLQSNDTAIYYCARALTYY |
| fused to TGFbR | DYEFAYWGQGTLVTVSAASTKGPSVFPLAPSSKSTSGGTAALGCLVKDYFP |
| ECD | EPVTVSWNSGALTSGVHIFPAVLQSSGLYSLSSVVTVPSSSLGTQTYICNVN |
| | HKPSNTKVDKRVEPKSCDKTHTCPPCPAPELLGGPSVFLFPPKPKDTLMISR |
| | TPEVTCVVVDVSHEDPEVKFNWYVDGVEVHNAKTKPREEQYNSTYRVVS |
| | VLTVLHQDWLNGKEYKCKVSNKALPAPIEKTISKAKGQPREPQVYTLPPSR |
| | DELTKNQVSLTCLVKGFYPSDIAVEWESNGQPENNYKTTPPVLDSDGSFFL |
| | YSKLTVDKSRWQQGNVFSCSVMHEALHNHYTQKSLSLSPGKGGGGSGGG |
| | GSGGGGSTIPPHVQKSVNNDMIVTDNNGAVKFPQLCKFCDVRFSTCDNQK |
| | SCMSNCSITSICEKPQEVCVAVWRKNDENITLETVCHDPKLPYHDFILEDAA |
| | SPKCIMKEKKKPGETFFMCSCSSDECNDNIIFSEEYNTSNPD |
| SEQ ID NO: 230 | QVQLKQSGPGLVQPSQSLSITCTVSGFSLTNYGVHWVRQSPGKGLEWLGVI |
| anti-EGFR HC | WSGGNTDYNTPFTSRLSINKDNSKSQVFFKMNSLQSNDTAIYYCARALTYY |
| fused to TIM3 | DYEFAYWGQGTLVTVSAASTKGPSVFPLAPSSKSTSGGTAALGCLVKDYFP |
| ECD | EPVTVSWNSGALTSGVHIFPAVLQSSGLYSLSSVVTVPSSSLGTQTYICNVN |
| | HKPSNTKVDKRVEPKSCDKTHTCPPCPAPELLGGPSVFLFPPKPKDTLMISR |
| | TPEVTCVVVDVSHEDPEVKFNWYVDGVEVHNAKTKPREEQYNSTYRVVS |
| | VLTVLHQDWLNGKEYKCKVSNKALPAPIEKTISKAKGQPREPQVYTLPPSR |
| | DELTKNQVSLTCLVKGFYPSDIAVEWESNGQPENNYKTTPPVLDSDGSFFL |
| | YSKLTVDKSRWQQGNVFSCSVMHEALHNHYTQKSLSLSPGKGGGGSGGG |
| | GSGGGGSSEVEYRAEVGQNAYLPCFYTPAAPGNLVPVCWGKGACPVFECG |
| | NVVLRTDERDVNYWTSRYWLNGDFRKGDVSLTIENVTLADSGIYCCRIQIP |
| | GIMNDEKFNLKLVIKPAKVTPAPTRQRDFTAAFPRMLTTRGHGPAETQTLG |
| | SLPDINLTQISTLANELRDSRLANDLRDSGATIRIG |
| SEQ ID NO: 231 | QVQLKQSGPGLVQPSQSLSITCTVSGFSLTNYGVHWVRQSPGKGLEWLGVI |
| anti-EGFR HC | WSGGNTDYNTPFTSRLSINKDNSKSQVFFKMNSLQSNDTAIYYCARALTYY |
| fused to VEGFR | DYEFAYWGQGTLVTVSAASTKGPSVFPLAPSSKSTSGGTAALGCLVKDYFP |
| ECD | EPVTVSWNSGALTSGVHIFPAVLQSSGLYSLSSVVTVPSSSLGTQTYICNVN |
| | HKPSNTKVDKRVEPKSCDKTHTCPPCPAPELLGGPSVFLFPPKPKDTLMISR |
| | TPEVTCVVVDVSHEDPEVKFNWYVDGVEVHNAKTKPREEQYNSTYRVVS |
| | VLTVLHQDWLNGKEYKCKVSNKALPAPIEKTISKAKGQPREPQVYTLPPSR |
| | DELTKNQVSLTCLVKGFYPSDIAVEWESNGQPENNYKTTPPVLDSDGSFFL |
| | YSKLTVDKSRWQQGNVFSCSVMHEALHNHYTQKSLSLSPGKGGGGSGGG |
| | GSGGGGSSDTGRPFVEMYSEIPEIIHMTEGRELVIPCRVTSPNITVTLKKFPL |
| | DTLIPDGKRIIWDSRKGFIISNATYKEIGLLTCEATVNGHLYKTNYLTHRQT |
| | NTIIDVVLSPSHGIELSVGEKLVLNCTARTELNVGIDFNWEYPSSKHQHKKL |
| | VNRDLKTQSGSEMKKFLSTLTIDGVTRSDQGLYTCAASSGLMTKKNSTFVR |
| | VHEK |
| SEQ ID NO: 232 | QVQLQESGPGLVKPSQTLSLTCTVSGYSISSDFAWNWIRQPPGKGLEWMG |
| anti-EGFRvIII | YISYSGNTRYQPSLKSRITISRDTSKNQFFLKLNSVTAADTATYYCVTAGRG |
| HC fused to | FPYWGQGTLVTVSSASTKGPSVFPLAPSSKSTSGGTAALGCLVKDYFPEPV |
| BTLA ECD | TVSWNSGALTSGVHTFPAVLQSSGLYSLSSVVTVPSSSLGTQTYICNVNHKP |
| | SNTKVDKKVEPKSCDKTHTCPPCPAPELLGGPSVFLFPPKPKDTLMISRTPE |
| | VTCVVVDVSHEDPEVKFNWYVDGVEVHNAKTKPREEQYNSTYRVVSVLT |
| | VLHQDWLNGKEYKCKVSNKALPAPIEKTISKAKGQPREPQVYTLPPSRDEL |
| | TKNQVSLTCLVKGFYPSDIAVEWESNGQPENNYKTTPPVLDSDGSFFLYSK |
| | LTVDKSRWQQGNVFSCSVMHEALHNHYTQKSLSLSPGKGGGGSGGGGSG |
| | GGGSKESCDVQLYIKRQSEHSILAGDPFELECPVKYCANRPHVTWCKLNGT |
| | TCVKLEDRQTSWKEEKNISFFILHFEPVLPNDNGSYRCSANFQSNLIESHSTT |
| | LYVTDVKSASERPSKDEMAS |
| SEQ ID NO: 233 | DIQMTQSPSSMSVSVGDRVTITCHSSQDINSNIGWLQQKPGKSFKGLIYHGT |
| anti-EGFRvIII | NLDDGVPSRFSGSGSGTDYTLTISSLQPEDFATYYCVQYAQFPWTFGGGTK |
| LC fused to PD1 | LEIKRTVAAPSVFIFPPSDEQLKSGTASVVCLLNNFYPREAKVQWKVDNAL |
| ECD | QSGNSQESVTEQDSKDSTYSLSSTLTLSKADYEKHKVYACEVTHQGLSSPV |
| | TKSFNRGECGGGGSGGGGSGGGGSPGWFLDSPDRPWNPPTFSPALLVVTE |
| | GDNATFTCSFSNTSESFVLNWYRMSPSNQTDKLAAFPEDRSQPGQDCRFRV |
| | TQLPNGRDFHMSVVRARRNDSGTYLCGAISLAPKAQIKESLRAELRVTERR |
| | AEVPTAHPSPSPRPAGQFQTLV |
| SEQ ID NO: 234 | DIQMTQSPSSMSVSVGDRVTITCHSSQDINSNIGWLQQKPGKSFKGLIYHGT |
| anti-EGFRvIII | NLDDGVPSRFSGSGSGTDYTLTISSLQPEDFATYYCVQYAQFPWTFGGGTK |
| LC fused to | LEIKRTVAAPSVFIFPPSDEQLKSGTASVVCLLNNFYPREAKVQWKVDNAL |
| SIGLEC10 ECD | QSGNSQESVTEQDSKDSTYSLSSTLTLSKADYEKHKVYACEVTHQGLSSPV |
| | TKSFNRGECGGGGSGGGGSGGGGSMDGRFWIRVQESVMVPEGLCISVPCS |
| | FSYPRQDWTGSTPAYGYWFKAVTETTKGAPVATNHQSREVEMSTRGRFQL |
| | TGDPAKGNCSLVIRDAQMQDESQYFFRVERGSYVRYNFMNDGFFLKVTAL |
| | TQKPDVYIPETLEPGQPVTVICVFNWAFEECPPPSFSWTGAALSSQGTKPTT |
| | SHFSVLSFTPRPQDHNTDLTCHVDFSRKGVSAQRTVRLRVAYAPRDLVISIS |
| | RDNTPALEPQPQGNVPYLEAQKGQFLRLLCAADSQPPATLSWVLQNRVLS |
| | SSHPWGPRPLGLELPGVKAGDSGRYTCRAENRLGSQQRALDLSVQYPPEN |
| | LRVMVSQANRTVLENLGNGTSLPVLEGQSLCLVCVTHSSPPARLSWTQRG |
| | QVLSPSQPSDPGVLELPRVQVEHEGEFTCHARHPLGSQHVSLSLSVHYSPKL |
| | LGPSCSWEAEGLHCSCSSQASPAPSLRWWLGEELLEGNSSQDSFEVTPSSA |
| | GPWANSSLSLHGGLSSGLRLRCEAWNVHGAQSGSILQLPDKKGLIST |
| SEQ ID NO: 235 | DIQMTQSPSSMSVSVGDRVTITCHSSQDINSNIGWLQQKPGKSFKGLIYHGT |
| anti-EGFRvIII | NLDDGVPSRFSGSGSGTDYTLTISSLQPEDFATYYCVQYAQFPWTFGGGTK |
| LC fused to | LEIKRTVAAPSVFIFPPSDEQLKSGTASVVCLLNNFYPREAKVQWKVDNAL |
| SIRPa ECD | QSGNSQESVTEQDSKDSTYSLSSTLTLSKADYEKHKVYACEVTHQGLSSPV |
| | TKSFNRGECGGGGSGGGGSGGGGSEEELQVIQPDKSVLVAAGETATLRCT |
| | ATSLIPVGPIQWFRGAGPGRELIYNQKEGHFPRVTTVSDLTKRNNMDFSIRI |
| | GNITPADAGTYYCVKFRKGSPDDVEFKSGAGTELSVRAKPS |
| SEQ ID NO: 236 | DIQMTQSPSSMSVSVGDRVTITCHSSQDINSNIGWLQQKPGKSFKGLIYHGT |
| anti-EGFRvIII | NLDDGVPSRFSGSGSGTDYTLTISSLQPEDFATYYCVQYAQFPWTFGGGTK |
| LC fused to TIM3 | LEIKRTVAAPSVFIFPPSDEQLKSGTASVVCLLNNFYPREAKVQWKVDNAL |
| ECD | QSGNSQESVTEQDSKDSTYSLSSTLTLSKADYEKHKVYACEVTHQGLSSPV |
| | TKSFNRGECGGGGSGGGGSGGGGSSEVEYRAEVGQNAYLPCFYTPAAPGN |
| | LVPVCWGKGACPVFECGNVVLRTDERDVNYWTSRYWLNGDFRKGDVSL |
| | TIENVTLADSGIYCCRIQIPGIMNDEKFNLKLVIKPAKVTPAPTRQRDFTAAF |
| | PRMLTTRGHGPAETQTLGSLPDINLTQISTLANELRDSRLANDLRDSGATIRI |
| | G |
| SEQ ID NO: 237 | QVQLQESGPGLVKPSQTLSLTCTVSGYSISSDFAWNWIRQPPGKGLEWMG |
| anti-EGFRvIII | YISYSGNTRYQPSLKSRITISRDTSKNQFFLKLNSVTAADTATYYCVTAGRG |
| HC fused to PD1 | FPYWGQGTLVTVSSASTKGPSVFPLAPSSKSTSGGTAALGCLVKDYFPEPV |
| ECD | TVSWNSGALTSGVHTFPAVLQSSGLYSLSSVVTVPSSSLGTQTYICNVNHKP |
| | SNTKVDKKVEPKSCDKTHTCPPCPAPELLGGPSVFLFPPKPKDTLMISRTPE |
| | VTCVVVDVSHEDPEVKFNWYVDGVEVHNAKTKPREEQYNSTYRVVSVLT |
| | VLHQDWLNGKEYKCKVSNKALPAPIEKTISKAKGQPREPQVYTLPPSRDEL |
| | TKNQVSLTCLVKGFYPSDIAVEWESNGQPENNYKTTPPVLDSDGSFFLYSK |
| | LTVDKSRWQQGNVFSCSVMHEALHNHYTQKSLSLSPGKGGGGSGGGGSG |
| | GGGSPGWFLDSPDRPWNPPTFSPALLVVTEGDNATFTCSFSNTSESFVLNW |
| | YRMSPSNQTDKLAAFPEDRSQPGQDCRFRVTQLPNGRDFHMSVVRARRND |
| | SGTYLCGAISLAPKAQIKESLRAELRVTERRAEVPTAHPSPSPRPAGQFQTL |
| | V |
| SEQ ID NO: 238 | DIQMTQSPSSMSVSVGDRVTITCHSSQDINSNIGWLQQKPGKSFKGLIYHGT |
| anti-EGFRAII | NLDDGVPSRFSGSGSGTDYTLTISSLQPEDFATYYCVQYAQFPWTFGGGTK |
| LC fused to | LEIKRTVAAPSVFIFPPSDEQLKSGTASVVCLLNNFYPREAKVQWKVDNAL |
| BTLA ECD | QSGNSQESVTEQDSKDSTYSLSSTLTLSKADYEKHKVYACEVTHQGLSSPV |
| | TKSFNRGECGGGGSGGGGSGGGGSKESCDVQLYIKRQSEHSILAGDPFELE |
| | CPVKYCANRPHVTWCKLNGTTCVKLEDRQTSWKEEKNISFFILHFEPVLPN |
| | DNGSYRCSANFQSNLIESHSTTLYVTDVKSASERPSKDEMAS |
| SEQ ID NO: 239 | QVQLQESGPGLVKPSQTLSLTCTVSGYSISSDFAWNWIRQPPGKGLEWMG |
| anti-EGFRvIII | YISYSGNTRYQPSLKSRITISRDTSKNQFFLKLNSVTAADTATYYCVTAGRG |
| HC fused to | FPYWGQGTLVTVSSASTKGPSVFPLAPSSKSTSGGTAALGCLVKDYFPEPV |
| SIGLEC10 ECD | TVSWNSGALTSGVHTFPAVLQSSGLYSLSSVVTVPSSSLGTQTYICNVNHKP |
| | SNTKVDKKVEPKSCDKTHTCPPCPAPELLGGPSVFLFPPKPKDTLMISRTPE |
| | VTCVVVDVSHEDPEVKFNWYVDGVEVHNAKTKPREEQYNSTYRVVSVLT |
| | VLHQDWLNGKEYKCKVSNKALPAPIEKTISKAKGQPREPQVYTLPPSRDEL |
| | TKNQVSLTCLVKGFYPSDIAVEWESNGQPENNYKTTPPVLDSDGSFFLYSK |
| | LTVDKSRWQQGNVFSCSVMHEALHNHYTQKSLSLSPGKGGGGSGGGGSG |
| | GGGSMDGRFWIRVQESVMVPEGLCISVPCSFSYPRQDWTGSTPAYGYWFK |
| | AVTETTKGAPVATNHQSREVEMSTRGRFQLTGDPAKGNCSLVIRDAQMQD |
| | ESQYFFRVERGSYVRYNFMNDGFFLKVTALTQKPDVYIPETLEPGQPVTVI |
| | CVFNWAFEECPPPSFSWTGAALSSQGTKPTTSHFSVLSFTPRPQDHNTDLTC |
| | HVDFSRKGVSAQRTVRLRVAYAPRDLVISISRDNTPALEPQPQGNVPYLEA |
| | QKGQFLRLLCAADSQPPATLSWVLQNRVLSSSHPWGPRPLGLELPGVKAG |
| | DSGRYTCRAENRLGSQQRALDLSVQYPPENLRVMVSQANRTVLENLGNGT |
| | SLPVLEGQSLCLVCVTHSSPPARLSWTQRGQVLSPSQPSDPGVLELPRVQVE |
| | HEGEFTCHARHPLGSQHVSLSLSVHYSPKLLGPSCSWEAEGLHCSCSSQASP |
| | APSLRWWLGEELLEGNSSQDSFEVTPSSAGPWANSSLSLHGGLSSGLRLRC |
| | EAWNVHGAQSGSILQLPDKKGLIST |
| SEQ ID NO: 240 | QVQLQESGPGLVKPSQTLSLTCTVSGYSISSDFAWNWIRQPPGKGLEWMG |
| anti-EGFRvIII | YISYSGNTRYQPSLKSRITISRDTSKNQFFLKLNSVTAADTATYYCVTAGRG |
| HC fused to | FPYWGQGTLVTVSSASTKGPSVFPLAPSSKSTSGGTAALGCLVKDYFPEPV |
| SIRPa ECD | TVSWNSGALTSGVHTFPAVLQSSGLYSLSSVVTVPSSSLGTQTYICNVNHKP |
| | SNTKVDKKVEPKSCDKTHTCPPCPAPELLGGPSVFLFPPKPKDTLMISRTPE |
| | VTCVVVDVSHEDPEVKFNWYVDGVEVHNAKTKPREEQYNSTYRVVSVLT |
| | VLHQDWLNGKEYKCKVSNKALPAPIEKTISKAKGQPREPQVYTLPPSRDEL |
| | TKNQVSLTCLVKGFYPSDIAVEWESNGQPENNYKTTPPVLDSDGSFFLYSK |
| | LTVDKSRWQQGNVFSCSVMHEALHNHYTQKSLSLSPGKGGGGSGGGGSG |
| | GGGSEEELQVIQPDKSVLVAAGETATLRCTATSLIPVGPIQWFRGAGPGREL |
| | IYNQKEGHFPRVTTVSDLTKRNNMDFSIRIGNITPADAGTYYCVKFRKGSPD |
| | DVEFKSGAGTELSVRAKPS |
| SEQ ID NO: 241 | QVQLQESGPGLVKPSQTLSLTCTVSGYSISSDFAWNWIRQPPGKGLEWMG |
| anti-EGFRvIII | YISYSGNTRYQPSLKSRITISRDTSKNQFFLKLNSVTAADTATYYCVTAGRG |
| HC fused to | FPYWGQGTLVTVSSASTKGPSVFPLAPSSKSTSGGTAALGCLVKDYFPEPV |
| TGFbRECD | TVSWNSGALTSGVHTFPAVLQSSGLYSLSSVVTVPSSSLGTQTYICNVNHKP |
| | SNTKVDKKVEPKSCDKTHTCPPCPAPELLGGPSVFLFPPKPKDTLMISRTPE |
| | VTCVVVDVSHEDPEVKFNWYVDGVEVHNAKTKPREEQYNSTYRVVSVLT |
| | VLHQDWLNGKEYKCKVSNKALPAPIEKTISKAKGQPREPQVYTLPPSRDEL |
| | TKNQVSLTCLVKGFYPSDIAVEWESNGQPENNYKTTPPVLDSDGSFFLYSK |
| | LTVDKSRWQQGNVFSCSVMHEALHNHYTQKSLSLSPGKGGGGSGGGGSG |
| | GGGSTIPPHVQKSVNNDMIVTDNNGAVKFPQLCKFCDVRFSTCDNQKSCM |
| | SNCSITSICEKPQEVCVAVWRKNDENITLETVCHDPKLPYHDFILEDAASPK |
| | CIMKEKKKPGETFFMCSCSSDECNDNIIFSEEYNTSNPD |
| SEQ ID NO: 242 | QVQLQESGPGLVKPSQTLSLTCTVSGYSISSDFAWNWIRQPPGKGLEWMG |
| anti-EGFRvIII | YISYSGNTRYQPSLKSRITISRDTSKNQFFLKLNSVTAADTATYYCVTAGRG |
| HC fused to TIM3 | FPYWGQGTLVTVSSASTKGPSVFPLAPSSKSTSGGTAALGCLVKDYFPEPV |
| ECD | TVSWNSGALTSGVHTFPAVLQSSGLYSLSSVVTVPSSSLGTQTYICNVNHKP |
| | SNTKVDKKVEPKSCDKTHTCPPCPAPELLGGPSVFLFPPKPKDTLMISRTPE |
| | VTCVVVDVSHEDPEVKFNWYVDGVEVHNAKTKPREEQYNSTYRVVSVLT |
| | VLHQDWLNGKEYKCKVSNKALPAPIEKTISKAKGQPREPQVYTLPPSRDEL |
| | TKNQVSLTCLVKGFYPSDIAVEWESNGQPENNYKTTPPVLDSDGSFFLYSK |
| | LTVDKSRWQQGNVFSCSVMHEALHNHYTQKSLSLSPGKGGGGSGGGGSG |
| | GGGSSEVEYRAEVGQNAYLPCFYTPAAPGNLVPVCWGKGACPVFECGNV |
| | VLRTDERDVNYWTSRYWLNGDFRKGDVSLTIENVTLADSGIYCCRIQIPGI |
| | MNDEKFNLKLVIKPAKVTPAPTRQRDFTAAFPRMLTTRGHGPAETQTLGSL |
| | PDINLTQISTLANELRDSRLANDLRDSGATIRIG |
| SEQ ID NO: 243 | QVQLQESGPGLVKPSQTLSLTCTVSGYSISSDFAWNWIRQPPGKGLEWMG |
| anti-EGFRAII | YISYSGNTRYQPSLKSRITISRDTSKNQFFLKLNSVTAADTATYYCVTAGRG |
| HC fused to | FPYWGQGTLVTVSSASTKGPSVFPLAPSSKSTSGGTAALGCLVKDYFPEPV |
| VEGFR ECD | TVSWNSGALTSGVHTFPAVLQSSGLYSLSSVVTVPSSSLGTQTYICNVNHKP |
| | SNTKVDKKVEPKSCDKTHTCPPCPAPELLGGPSVFLFPPKPKDTLMISRTPE |
| | VTCVVVDVSHEDPEVKFNWYVDGVEVHNAKTKPREEQYNSTYRVVSVLT |
| | VLHQDWLNGKEYKCKVSNKALPAPIEKTISKAKGQPREPQVYTLPPSRDEL |
| | TKNQVSLTCLVKGFYPSDIAVEWESNGQPENNYKTTPPVLDSDGSFFLYSK |
| | LTVDKSRWQQGNVFSCSVMHEALHNHYTQKSLSLSPGKGGGGSGGGGSG |
| | GGGSSDTGRPFVEMYSEIPEIIHMTEGRELVIPCRVTSPNITVTLKKFPLDTLI |
| | PDGKRIIWDSRKGFIISNATYKEIGLLTCEATVNGHLYKTNYLTHRQTNTIID |
| | VVLSPSHGIELSVGEKLVLNCTARTELNVGIDFNWEYPSSKHQHKKLVNRD |
| | LKTQSGSEMKKFLSTLTIDGVTRSDQGLYTCAASSGLMTKKNSTFVRVHEK |
| SEQ ID NO: 244 | EVQLVESGGGLVQPGGSLRLSCAASGFNIKDTYIHWVRQAPGKGLEWVAR |
| anti-HER2 HC | IYPTNGYTRYADSVKGRFTISADTSKNTAYLQMNSLRAEDTAVYYCSRWG |
| fused to BTLA | GDGFYAMDYWGQGTLVTVSSASTKGPSVFPLAPSSKSTSGGTAALGCLVK |
| ECD | DYFPEPVTVSWNSGALTSGVHTFPAVLQSSGLYSLSSVVTVPSSSLGTQTYI |
| | CNVNHKPSNTKVDKKVEPKSCDKTHTCPPCPAPELLGGPSVFLFPPKPKDT |
| | LMISRTPEVTCVVVDVSHEDPEVKFNWYVDGVEVHNAKTKPREEQYNSTY |
| | RVVSVLTVLHQDWLNGKEYKCKVSNKALPAPIEKTISKAKGQPREPQVYT |
| | LPPSREEMTKNQVSLTCLVKGFYPSDIAVEWESNGQPENNYKTTPPVLDSD |
| | GSFFLYSKLTVDKSRWQQGNVFSCSVMHEALHNHYTQKSLSLSPGKGGGG |
| | SGGGGSGGGGSKESCDVQLYIKRQSEHSILAGDPFELECPVKYCANRPHVT |
| | WCKLNGTTCVKLEDRQTSWKEEKNISFFILHFEPVLPNDNGSYRCSANFQS |
| | NLIESHSTTLYVTDVKSASERPSKDEMAS |
| SEQ ID NO: 245 | DIQMTQSPSSLSASVGDRVTITCRASQDVNTAVAWYQQKPGKAPKLLIYSA |
| anti-HER2 LC | SFLYSGVPSRFSGSRSGTDFTLTISSLQPEDFATYYCQQHYTTPPTFGQGTKV |
| fused to PD1 ECD | EIKRTVAAPSVFIFPPSDEQLKSGTASVVCLLNNFYPREAKVQWKVDNALQ |
| | SGNSQESVTEQDSKDSTYSLSSTLTLSKADYEKHKVYACEVTHQGLSSPVT |
| | KSFNRGECGGGGSGGGGSGGGGSPGWFLDSPDRPWNPPTFSPALLVVTEG |
| | DNATFTCSFSNTSESFVLNWYRMSPSNQTDKLAAFPEDRSQPGQDCRFRVT |
| | QLPNGRDFHMSVVRARRNDSGTYLCGAISLAPKAQIKESLRAELRVTERRA |
| | EVPTAHPSPSPRPAGQFQTLV |
| SEQ ID NO: 246 | DIQMTQSPSSLSASVGDRVTITCRASQDVNTAVAWYQQKPGKAPKLLIYSA |
| anti-HER2 LC | SFLYSGVPSRFSGSRSGTDFTLTISSLQPEDFATYYCQQHYTTPPTFGQGTKV |
| fused to | EIKRTVAAPSVFIFPPSDEQLKSGTASVVCLLNNFYPREAKVQWKVDNALQ |
| SIGLEC10 ECD | SGNSQESVTEQDSKDSTYSLSSTLTLSKADYEKHKVYACEVTHQGLSSPVT |
| | KSFNRGECGGGGSGGGGSGGGGSMDGRFWIRVQESVMVPEGLCISVPCSF |
| | SYPRQDWTGSTPAYGYWFKAVTETTKGAPVATNHQSREVEMSTRGRFQL |
| | TGDPAKGNCSLVIRDAQMQDESQYFFRVERGSYVRYNFMNDGFFLKVTAL |
| | TQKPDVYIPETLEPGQPVTVICVFNWAFEECPPPSFSWTGAALSSQGTKPTT |
| | SHFSVLSFTPRPQDHNTDLTCHVDFSRKGVSAQRTVRLRVAYAPRDLVISIS |
| | RDNTPALEPQPQGNVPYLEAQKGQFLRLLCAADSQPPATLSWVLQNRVLS |
| | SSHPWGPRPLGLELPGVKAGDSGRYTCRAENRLGSQQRALDLSVQYPPEN |
| | LRVMVSQANRTVLENLGNGTSLPVLEGQSLCLVCVTHSSPPARLSWTQRG |
| | QVLSPSQPSDPGVLELPRVQVEHEGEFTCHARHPLGSQHVSLSLSVHYSPKL |
| | LGPSCSWEAEGLHCSCSSQASPAPSLRWWLGEELLEGNSSQDSFEVTPSSA |
| | GPWANSSLSLHGGLSSGLRLRCEAWNVHGAQSGSILQLPDKKGLIST |
| SEQ ID NO: 247 | DIQMTQSPSSLSASVGDRVTITCRASQDVNTAVAWYQQKPGKAPKLLIYSA |
| anti-HER2 LC | SFLYSGVPSRFSGSRSGTDFTLTISSLQPEDFATYYCQQHYTTPPTFGQGTKV |
| fused to SIRPa | EIKRTVAAPSVFIFPPSDEQLKSGTASVVCLLNNFYPREAKVQWKVDNALQ |
| ECD | SGNSQESVTEQDSKDSTYSLSSTLTLSKADYEKHKVYACEVTHQGLSSPVT |
| | KSFNRGECGGGGSGGGGSGGGGSEEELQVIQPDKSVLVAAGETATLRCTA |
| | TSLIPVGPIQWFRGAGPGRELIYNQKEGHFPRVTTVSDLTKRNNMDFSIRIG |
| | NITPADAGTYYCVKFRKGSPDDVEFKSGAGTELSVRAKPS |
| SEQ ID NO: 248 | DIQMTQSPSSLSASVGDRVTITCRASQDVNTAVAWYQQKPGKAPKLLIYSA |
| anti-HER2 LC | SFLYSGVPSRFSGSRSGTDFTLTISSLQPEDFATYYCQQHYTTPPTFGQGTKV |
| fused to TIM3 | EIKRTVAAPSVFIFPPSDEQLKSGTASVVCLLNNFYPREAKVQWKVDNALQ |
| ECD | SGNSQESVTEQDSKDSTYSLSSTLTLSKADYEKHKVYACEVTHQGLSSPVT |
| | KSFNRGECGGGGSGGGGSGGGGSSEVEYRAEVGQNAYLPCFYTPAAPGNL |
| | VPVCWGKGACPVFECGNVVLRTDERDVNYWTSRYWLNGDFRKGDVSLTI |
| | ENVTLADSGIYCCRIQIPGIMNDEKFNLKLVIKPAKVTPAPTRQRDFTAAFP |
| | RMLTTRGHGPAETQTLGSLPDINLTQISTLANELRDSRLANDLRDSGATIRI |
| | G |
| SEQ ID NO: 249 | EVQLVESGGGLVQPGGSLRLSCAASGFNIKDTYIHWVRQAPGKGLEWVAR |
| anti-HER2 HC | IYPTNGYTRYADSVKGRFTISADTSKNTAYLQMNSLRAEDTAVYYCSRWG |
| fused to PD1 ECD | GDGFYAMDYWGQGTLVTVSSASTKGPSVFPLAPSSKSTSGGTAALGCLVK |
| | DYFPEPVTVSWNSGALTSGVHTFPAVLQSSGLYSLSSVVTVPSSSLGTQTYI |
| | CNVNHKPSNTKVDKKVEPKSCDKTHTCPPCPAPELLGGPSVFLFPPKPKDT |
| | LMISRTPEVTCVVVDVSHEDPEVKFNWYVDGVEVHNAKTKPREEQYNSTY |
| | RVVSVLTVLHQDWLNGKEYKCKVSNKALPAPIEKTISKAKGQPREPQVYT |
| | LPPSREEMTKNQVSLTCLVKGFYPSDIAVEWESNGQPENNYKTTPPVLDSD |
| | GSFFLYSKLTVDKSRWQQGNVFSCSVMHEALHNHYTQKSLSLSPGKGGGG |
| | SGGGGSGGGGSPGWFLDSPDRPWNPPTFSPALLVVTEGDNATFTCSFSNTS |
| | ESFVLNWYRMSPSNQTDKLAAFPEDRSQPGQDCRFRVTQLPNGRDFHMSV |
| | VRARRNDSGTYLCGAISLAPKAQIKESLRAELRVTERRAEVPTAHPSPSPRP |
| | AGQFQTLV |
| SEQ ID NO: 250 | DIQMTQSPSSLSASVGDRVTITCRASQDVNTAVAWYQQKPGKAPKLLIYSA |
| anti-HER2 LC | SFLYSGVPSRFSGSRSGTDFTLTISSLQPEDFATYYCQQHYTTPPTFGQGTKV |
| fused to BTLA | EIKRTVAAPSVFIFPPSDEQLKSGTASVVCLLNNFYPREAKVQWKVDNALQ |
| ECD | SGNSQESVTEQDSKDSTYSLSSTLTLSKADYEKHKVYACEVTHQGLSSPVT |
| | KSFNRGECGGGGSGGGGSGGGGSKESCDVQLYIKRQSEHSILAGDPFELEC |
| | PVKYCANRPHVTWCKLNGTTCVKLEDRQTSWKEEKNISFFILHFEPVLPND |
| | NGSYRCSANFQSNLIESHSTTLYVTDVKSASERPSKDEMAS |
| SEQ ID NO: 251 | EVQLVESGGGLVQPGGSLRLSCAASGFNIKDTYIHWVRQAPGKGLEWVAR |
| anti-HER2 HC | IYPTNGYTRYADSVKGRFTISADTSKNTAYLQMNSLRAEDTAVYYCSRWG |
| fused to | GDGFYAMDYWGQGTLVTVSSASTKGPSVFPLAPSSKSTSGGTAALGCLVK |
| SIGLEC10 ECD | DYFPEPVTVSWNSGALTSGVHTFPAVLQSSGLYSLSSVVTVPSSSLGTQTYI |
| | CNVNHKPSNTKVDKKVEPKSCDKTHTCPPCPAPELLGGPSVFLFPPKPKDT |
| | LMISRTPEVTCVVVDVSHEDPEVKFNWYVDGVEVHNAKTKPREEQYNSTY |
| | RVVSVLTVLHQDWLNGKEYKCKVSNKALPAPIEKTISKAKGQPREPQVYT |
| | LPPSREEMTKNQVSLTCLVKGFYPSDIAVEWESNGQPENNYKTTPPVLDSD |
| | GSFFLYSKLTVDKSRWQQGNVFSCSVMHEALHNHYTQKSLSLSPGKGGGG |
| | SGGGGSGGGGSMDGRFWIRVQESVMVPEGLCISVPCSFSYPRQDWTGSTP |
| | AYGYWFKAVTETTKGAPVATNHQSREVEMSTRGRFQLTGDPAKGNCSLVI |
| | RDAQMQDESQYFFRVERGSYVRYNFMNDGFFLKVTALTQKPDVYIPETLE |
| | PGQPVTVICVFNWAFEECPPPSFSWTGAALSSQGTKPTTSHFSVLSFTPRPQ |
| | DHNTDLTCHVDFSRKGVSAQRTVRLRVAYAPRDLVISISRDNTPALEPQPQ |
| | GNVPYLEAQKGQFLRLLCAADSQPPATLSWVLQNRVLSSSHPWGPRPLGL |
| | ELPGVKAGDSGRYTCRAENRLGSQQRALDLSVQYPPENLRVMVSQANRTV |
| | LENLGNGTSLPVLEGQSLCLVCVTHSSPPARLSWTQRGQVLSPSQPSDPGV |
| | LELPRVQVEHEGEFTCHARHPLGSQHVSLSLSVHYSPKLLGPSCSWEAEGL |
| | HCSCSSQASPAPSLRWWLGEELLEGNSSQDSFEVTPSSAGPWANSSLSLHG |
| | GLSSGLRLRCEAWNVHGAQSGSILQLPDKKGLIST |
| SEQ ID NO: 252 | EVQLVESGGGLVQPGGSLRLSCAASGFNIKDTYIHWVRQAPGKGLEWVAR |
| anti-HER2 HC | IYPTNGYTRYADSVKGRFTISADTSKNTAYLQMNSLRAEDTAVYYCSRWG |
| fused to SIRPa | GDGFYAMDYWGQGTLVTVSSASTKGPSVFPLAPSSKSTSGGTAALGCLVK |
| ECD | DYFPEPVTVSWNSGALTSGVHTFPAVLQSSGLYSLSSVVTVPSSSLGTQTYI |
| | CNVNHKPSNTKVDKKVEPKSCDKTHTCPPCPAPELLGGPSVFLFPPKPKDT |
| | LMISRTPEVTCVVVDVSHEDPEVKFNWYVDGVEVHNAKTKPREEQYNSTY |
| | RVVSVLTVLHQDWLNGKEYKCKVSNKALPAPIEKTISKAKGQPREPQVYT |
| | LPPSREEMTKNQVSLTCLVKGFYPSDIAVEWESNGQPENNYKTTPPVLDSD |
| | GSFFLYSKLTVDKSRWQQGNVFSCSVMHEALHNHYTQKSLSLSPGKGGGG |
| | SGGGGSGGGGSEEELQVIQPDKSVLVAAGETATLRCTATSLIPVGPIQWFRG |
| | AGPGRELIYNQKEGHFPRVTTVSDLTKRNNMDFSIRIGNITPADAGTYYCV |
| | KFRKGSPDDVEFKSGAGTELSVRAKPS |
| SEQ ID NO: 253 | EVQLVESGGGLVQPGGSLRLSCAASGFNIKDTYIHWVRQAPGKGLEWVAR |
| anti-HER2 HC | IYPTNGYTRYADSVKGRFTISADTSKNTAYLQMNSLRAEDTAVYYCSRWG |
| fused to TGFbR | GDGFYAMDYWGQGTLVTVSSASTKGPSVFPLAPSSKSTSGGTAALGCLVK |
| ECD | DYFPEPVTVSWNSGALTSGVHTFPAVLQSSGLYSLSSVVTVPSSSLGTQTYI |
| | CNVNHKPSNTKVDKKVEPKSCDKTHTCPPCPAPELLGGPSVFLFPPKPKDT |
| | LMISRTPEVTCVVVDVSHEDPEVKFNWYVDGVEVHNAKTKPREEQYNSTY |
| | RVVSVLTVLHQDWLNGKEYKCKVSNKALPAPIEKTISKAKGQPREPQVYT |
| | LPPSREEMTKNQVSLTCLVKGFYPSDIAVEWESNGQPENNYKTTPPVLDSD |
| | GSFFLYSKLTVDKSRWQQGNVFSCSVMHEALHNHYTQKSLSLSPGKGGGG |
| | SGGGGSGGGGSTIPPHVQKSVNNDMIVTDNNGAVKFPQLCKFCDVRFSTC |
| | DNQKSCMSNCSITSICEKPQEVCVAVWRKNDENITLETVCHDPKLPYHDFIL |
| | EDAASPKCIMKEKKKPGETFFMCSCSSDECNDNIIFSEEYNTSNPD |
| SEQ ID NO: 254 | EVQLVESGGGLVQPGGSLRLSCAASGFNIKDTYIHWVRQAPGKGLEWVAR |
| anti-HER2 HC | IYPTNGYTRYADSVKGRFTISADTSKNTAYLQMNSLRAEDTAVYYCSRWG |
| fused to TIM3 | GDGFYAMDYWGQGTLVTVSSASTKGPSVFPLAPSSKSTSGGTAALGCLVK |
| ECD | DYFPEPVTVSWNSGALTSGVHTFPAVLQSSGLYSLSSVVTVPSSSLGTQTYI |
| | CNVNHKPSNTKVDKKVEPKSCDKTHTCPPCPAPELLGGPSVFLFPPKPKDT |
| | LMISRTPEVTCVVVDVSHEDPEVKFNWYVDGVEVHNAKTKPREEQYNSTY |
| | RVVSVLTVLHQDWLNGKEYKCKVSNKALPAPIEKTISKAKGQPREPQVYT |
| | LPPSREEMTKNQVSLTCLVKGFYPSDIAVEWESNGQPENNYKTTPPVLDSD |
| | GSFFLYSKLTVDKSRWQQGNVFSCSVMHEALHNHYTQKSLSLSPGKGGGG |
| | SGGGGSGGGGSSEVEYRAEVGQNAYLPCFYTPAAPGNLVPVCWGKGACP |
| | VFECGNVVLRTDERDVNYWTSRYWLNGDFRKGDVSLTIENVTLADSGIYC |
| | CRIQIPGIMNDEKFNLKLVIKPAKVTPAPTRQRDFTAAFPRMLTTRGHGPAE |
| | TQTLGSLPDINLTQISTLANELRDSRLANDLRDSGATIRIG |
| SEQ ID NO: 255 | EVQLVESGGGLVQPGGSLRLSCAASGFNIKDTYIHWVRQAPGKGLEWVAR |
| anti-HER2 HC | IYPTNGYTRYADSVKGRFTISADTSKNTAYLQMNSLRAEDTAVYYCSRWG |
| fused to VEGFR | GDGFYAMDYWGQGTLVTVSSASTKGPSVFPLAPSSKSTSGGTAALGCLVK |
| ECD | DYFPEPVTVSWNSGALTSGVHTFPAVLQSSGLYSLSSVVTVPSSSLGTQTYI |
| | CNVNHKPSNTKVDKKVEPKSCDKTHTCPPCPAPELLGGPSVFLFPPKPKDT |
| | LMISRTPEVTCVVVDVSHEDPEVKFNWYVDGVEVHNAKTKPREEQYNSTY |
| | RVVSVLTVLHQDWLNGKEYKCKVSNKALPAPIEKTISKAKGQPREPQVYT |
| | LPPSREEMTKNQVSLTCLVKGFYPSDIAVEWESNGQPENNYKTTPPVLDSD |
| | GSFFLYSKLTVDKSRWQQGNVFSCSVMHEALHNHYTQKSLSLSPGKGGGG |
| | SGGGGSGGGGSSDTGRPFVEMYSEIPEIIHMTEGRELVIPCRVTSPNITVTLK |
| | KFPLDTLIPDGKRIIWDSRKGFIISNATYKEIGLLTCEATVNGHLYKTNYLTH |
| | RQTNTIIDVVLSPSHGIELSVGEKLVLNCTARTELNVGIDFNWEYPSSKHQH |
| | KKLVNRDLKTQSGSEMKKFLSTLTIDGVTRSDQGLYTCAASSGLMTKKNS |
| | TFVRVHEK |
| SEQ ID NO: 256 | EVQLVESGGGLVQPGGSLRLSCAASGFTFSSYNMNWVRQAPGKGLEWVS |
| anti-nectin4 HC | YISSSSSTIYYADSVKGRFTISRDNAKNSLSLQMNSLRDEDTAVYYCARAY |
| fused to BTLA | YYGMDVWGQGTTVTVSSASTKGPSVFPLAPSSKSTSGGTAALGCLVKDYF |
| ECD | PEPVTVSWNSGALTSGVHTFPAVLQSSGLYSLSSVVTVPSSSLGTQTYICNV |
| | NHKPSNTKVDKRVEPKSCDKTHTCPPCPAPELLGGPSVFLFPPKPKDTLMIS |
| | RTPEVTCVVVDVSHEDPEVKFNWYVDGVEVHNAKTKPREEQYNSTYRVV |
| | SVLTVLHQDWLNGKEYKCKVSNKALPAPIEKTISKAKGQPREPQVYTLPPS |
| | REEMTKNQVSLTCLVKGFYPSDIAVEWESNGQPENNYKTTPPVLDSDGSFF |
| | LYSKLTVDKSRWQQGNVFSCSVMHEALHNHYTQKSLSLSPGKGGGGSGG |
| | GGSGGGGSKESCDVQLYIKRQSEHSILAGDPFELECPVKYCANRPHVTWCK |
| | LNGTTCVKLEDRQTSWKEEKNISFFILHEEPVLPNDNGSYRCSANFQSNLIE |
| | SHSTTLYVTDVKSASERPSKDEMAS |
| SEQ ID NO: 257 | DIQMTQSPSSVSASVGDRVTITCRASQGISGWLAWYQQKPGKAPKFLIYAA |
| anti-nectin4 LC | STLQSGVPSRFSGSGSGTDFTLTISSLQPEDFATYYCQQANSFPPTFGGGTKV |
| fused to PD1 ECD | EIKRTVAAPSVFIFPPSDEQLKSGTASVVCLLNNFYPREAKVQWKVDNALQ |
| | SGNSQESVTEQDSKDSTYSLSSTLTLSKADYEKHKVYACEVTHQGLSSPVT |
| | KSFNRGECGGGGSGGGGSGGGGSPGWFLDSPDRPWNPPTFSPALLVVTEG |
| | DNATFTCSFSNTSESFVLNWYRMSPSNQTDKLAAFPEDRSQPGQDCRFRVT |
| | QLPNGRDFHMSVVRARRNDSGTYLCGAISLAPKAQIKESLRAELRVTERRA |
| | EVPTAHPSPSPRPAGQFQTLV |
| SEQ ID NO: 258 | DIQMTQSPSSVSASVGDRVTITCRASQGISGWLAWYQQKPGKAPKFLIYAA |
| anti-nectin4 LC | STLQSGVPSRFSGSGSGTDFTLTISSLQPEDFATYYCQQANSFPPTFGGGTKV |
| fused to | EIKRTVAAPSVFIFPPSDEQLKSGTASVVCLLNNFYPREAKVQWKVDNALQ |
| SIGLEC10 ECD | SGNSQESVTEQDSKDSTYSLSSTLTLSKADYEKHKVYACEVTHQGLSSPVT |
| | KSFNRGECGGGGSGGGGSGGGGSMDGRFWIRVQESVMVPEGLCISVPCSF |
| | SYPRQDWTGSTPAYGYWFKAVTETTKGAPVATNHQSREVEMSTRGRFQL |
| | TGDPAKGNCSLVIRDAQMQDESQYFFRVERGSYVRYNFMNDGFFLKVTAL |
| | TQKPDVYIPETLEPGQPVTVICVFNWAFEECPPPSFSWTGAALSSQGTKPTT |
| | SHFSVLSFTPRPQDHNTDLTCHVDFSRKGVSAQRTVRLRVAYAPRDLVISIS |
| | RDNTPALEPQPQGNVPYLEAQKGQFLRLLCAADSQPPATLSWVLQNRVLS |
| | SSHPWGPRPLGLELPGVKAGDSGRYTCRAENRLGSQQRALDLSVQYPPEN |
| | LRVMVSQANRTVLENLGNGTSLPVLEGQSLCLVCVTHSSPPARLSWTQRG |
| | QVLSPSQPSDPGVLELPRVQVEHEGEFTCHARHPLGSQHVSLSLSVHYSPKL |
| | LGPSCSWEAEGLHCSCSSQASPAPSLRWWLGEELLEGNSSQDSFEVTPSSA |
| | GPWANSSLSLHGGLSSGLRLRCEAWNVHGAQSGSILQLPDKKGLIST |
| SEQ ID NO: 259 | DIQMTQSPSSVSASVGDRVTITCRASQGISGWLAWYQQKPGKAPKFLIYAA |
| anti-nectin4 LC | STLQSGVPSRFSGSGSGTDFTLTISSLQPEDFATYYCQQANSFPPTFGGGTKV |
| fused to SIRPa | EIKRTVAAPSVFIFPPSDEQLKSGTASVVCLLNNFYPREAKVQWKVDNALQ |
| ECD | SGNSQESVTEQDSKDSTYSLSSTLTLSKADYEKHKVYACEVTHQGLSSPVT |
| | KSFNRGECGGGGSGGGGSGGGGSEEELQVIQPDKSVLVAAGETATLRCTA |
| | TSLIPVGPIQWFRGAGPGRELIYNQKEGHFPRVTTVSDLTKRNNMDFSIRIG |
| | NITPADAGTYYCVKFRKGSPDDVEFKSGAGTELSVRAKPS |
| SEQ ID NO: 260 | DIQMTQSPSSVSASVGDRVTITCRASQGISGWLAWYQQKPGKAPKFLIYAA |
| anti-nectin4 LC | STLQSGVPSRFSGSGSGTDFTLTISSLQPEDFATYYCQQANSFPPTFGGGTKV |
| fused to TIM3 | EIKRTVAAPSVFIFPPSDEQLKSGTASVVCLLNNFYPREAKVQWKVDNALQ |
| ECD | SGNSQESVTEQDSKDSTYSLSSTLTLSKADYEKHKVYACEVTHQGLSSPVT |
| | KSFNRGECGGGGSGGGGSGGGGSSEVEYRAEVGQNAYLPCFYTPAAPGNL |
| | VPVCWGKGACPVFECGNVVLRTDERDVNYWTSRYWLNGDFRKGDVSLTI |
| | ENVTLADSGIYCCRIQIPGIMNDEKFNLKLVIKPAKVTPAPTRQRDFTAAFP |
| | RMLTTRGHGPAETQTLGSLPDINLTQISTLANELRDSRLANDLRDSGATIRI |
| | G |
| SEQ ID NO: 261 | EVQLVESGGGLVQPGGSLRLSCAASGFTFSSYNMNWVRQAPGKGLEWVS |
| anti-nectin4 HC | YISSSSSTIYYADSVKGRFTISRDNAKNSLSLQMNSLRDEDTAVYYCARAY |
| fused to PD1 ECD | YYGMDVWGQGTTVTVSSASTKGPSVFPLAPSSKSTSGGTAALGCLVKDYF |
| | PEPVTVSWNSGALTSGVHTFPAVLQSSGLYSLSSVVTVPSSSLGTQTYICNV |
| | NHKPSNTKVDKRVEPKSCDKTHTCPPCPAPELLGGPSVFLFPPKPKDTLMIS |
| | RTPEVTCVVVDVSHEDPEVKFNWYVDGVEVHNAKTKPREEQYNSTYRVV |
| | SVLTVLHQDWLNGKEYKCKVSNKALPAPIEKTISKAKGQPREPQVYTLPPS |
| | REEMTKNQVSLTCLVKGFYPSDIAVEWESNGQPENNYKTTPPVLDSDGSFF |
| | LYSKLTVDKSRWQQGNVFSCSVMHEALHNHYTQKSLSLSPGKGGGGSGG |
| | GGSGGGGSPGWFLDSPDRPWNPPTFSPALLVVTEGDNATFTCSFSNTSESFV |
| | LNWYRMSPSNQTDKLAAFPEDRSQPGQDCRFRVTQLPNGRDFHMSVVRA |
| | RRNDSGTYLCGAISLAPKAQIKESLRAELRVTERRAEVPTAHPSPSPRPAGQ |
| | FQTLV |
| SEQ ID NO: 262 | DIQMTQSPSSVSASVGDRVTITCRASQGISGWLAWYQQKPGKAPKFLIYAA |
| anti-nectin4 LC | STLQSGVPSRFSGSGSGTDFTLTISSLQPEDFATYYCQQANSFPPTFGGGTKV |
| fused to BTLA | EIKRTVAAPSVFIFPPSDEQLKSGTASVVCLLNNFYPREAKVQWKVDNALQ |
| ECD | SGNSQESVTEQDSKDSTYSLSSTLTLSKADYEKHKVYACEVTHQGLSSPVT |
| | KSFNRGECGGGGSGGGGSGGGGSKESCDVQLYIKRQSEHSILAGDPFELEC |
| | PVKYCANRPHVTWCKLNGTTCVKLEDRQTSWKEEKNISFFILHFEPVLPND |
| | NGSYRCSANFQSNLIESHSTTLYVTDVKSASERPSKDEMAS |
| SEQ ID NO: 263 | EVQLVESGGGLVQPGGSLRLSCAASGFTFSSYNMNWVRQAPGKGLEWVS |
| anti-nectin4 HC | YISSSSSTIYYADSVKGRFTISRDNAKNSLSLQMNSLRDEDTAVYYCARAY |
| fused to | YYGMDVWGQGTTVTVSSASTKGPSVFPLAPSSKSTSGGTAALGCLVKDYF |
| SIGLEC10 ECD | PEPVTVSWNSGALTSGVHTFPAVLQSSGLYSLSSVVTVPSSSLGTQTYICNV |
| | NHKPSNTKVDKRVEPKSCDKTHTCPPCPAPELLGGPSVFLFPPKPKDTLMIS |
| | RTPEVTCVVVDVSHEDPEVKFNWYVDGVEVHNAKTKPREEQYNSTYRVV |
| | SVLTVLHQDWLNGKEYKCKVSNKALPAPIEKTISKAKGQPREPQVYTLPPS |
| | REEMTKNQVSLTCLVKGFYPSDIAVEWESNGQPENNYKTTPPVLDSDGSFF |
| | LYSKLTVDKSRWQQGNVFSCSVMHEALHNHYTQKSLSLSPGKGGGGSGG |
| | GGSGGGGSMDGRFWIRVQESVMVPEGLCISVPCSFSYPRQDWTGSTPAYG |
| | YWFKAVTETTKGAPVATNHQSREVEMSTRGRFQLTGDPAKGNCSLVIRDA |
| | QMQDESQYFFRVERGSYVRYNFMNDGFFLKVTALTQKPDVYIPETLEPGQ |
| | PVTVICVFNWAFEECPPPSFSWTGAALSSQGTKPTTSHFSVLSFTPRPQDHN |
| | TDLTCHVDFSRKGVSAQRTVRLRVAYAPRDLVISISRDNTPALEPQPQGNV |
| | PYLEAQKGQFLRLLCAADSQPPATLSWVLQNRVLSSSHPWGPRPLGLELPG |
| | VKAGDSGRYTCRAENRLGSQQRALDLSVQYPPENLRVMVSQANRTVLEN |
| | LGNGTSLPVLEGQSLCLVCVTHSSPPARLSWTQRGQVLSPSQPSDPGVLELP |
| | RVQVEHEGEFTCHARHPLGSQHVSLSLSVHYSPKLLGPSCSWEAEGLHCSC |
| | SSQASPAPSLRWWLGEELLEGNSSQDSFEVTPSSAGPWANSSLSLHGGLSS |
| | GLRLRCEAWNVHGAQSGSILQLPDKKGLIST |
| SEQ ID NO: 264 | EVQLVESGGGLVQPGGSLRLSCAASGFTFSSYNMNWVRQAPGKGLEWVS |
| anti-nectin4 HC | YISSSSSTIYYADSVKGRFTISRDNAKNSLSLQMNSLRDEDTAVYYCARAY |
| fused to SIRPa | YYGMDVWGQGTTVTVSSASTKGPSVFPLAPSSKSTSGGTAALGCLVKDYF |
| ECD | PEPVTVSWNSGALTSGVHTFPAVLQSSGLYSLSSVVTVPSSSLGTQTYICNV |
| | NHKPSNTKVDKRVEPKSCDKTHTCPPCPAPELLGGPSVFLFPPKPKDTLMIS |
| | RTPEVTCVVVDVSHEDPEVKFNWYVDGVEVHNAKTKPREEQYNSTYRVV |
| | SVLTVLHQDWLNGKEYKCKVSNKALPAPIEKTISKAKGQPREPQVYTLPPS |
| | REEMTKNQVSLTCLVKGFYPSDIAVEWESNGQPENNYKTTPPVLDSDGSFF |
| | LYSKLTVDKSRWQQGNVFSCSVMHEALHNHYTQKSLSLSPGKGGGGSGG |
| | GGSGGGGSEEELQVIQPDKSVLVAAGETATLRCTATSLIPVGPIQWFRGAGP |
| | GRELIYNQKEGHFPRVTTVSDLTKRNNMDFSIRIGNITPADAGTYYCVKFR |
| | KGSPDDVEFKSGAGTELSVRAKPS |
| SEQ ID NO: 265 | EVQLVESGGGLVQPGGSLRLSCAASGFTFSSYNMNWVRQAPGKGLEWVS |
| anti-nectin4 HC | YISSSSSTIYYADSVKGRFTISRDNAKNSLSLQMNSLRDEDTAVYYCARAY |
| fused to TGFbR | YYGMDVWGQGTTVTVSSASTKGPSVFPLAPSSKSTSGGTAALGCLVKDYF |
| ECD | PEPVTVSWNSGALTSGVHTFPAVLQSSGLYSLSSVVTVPSSSLGTQTYICNV |
| | NHKPSNTKVDKRVEPKSCDKTHTCPPCPAPELLGGPSVFLFPPKPKDTLMIS |
| | RTPEVTCVVVDVSHEDPEVKFNWYVDGVEVHNAKTKPREEQYNSTYRVV |
| | SVLTVLHQDWLNGKEYKCKVSNKALPAPIEKTISKAKGQPREPQVYTLPPS |
| | REEMTKNQVSLTCLVKGFYPSDIAVEWESNGQPENNYKTTPPVLDSDGSFF |
| | LYSKLTVDKSRWQQGNVFSCSVMHEALHNHYTQKSLSLSPGKGGGGSGG |
| | GGSGGGGSTIPPHVQKSVNNDMIVTDNNGAVKFPQLCKFCDVRFSTCDNQ |
| | KSCMSNCSITSICEKPQEVCVAVWRKNDENITLETVCHDPKLPYHDFILEDA |
| | ASPKCIMKEKKKPGETFFMCSCSSDECNDNIIFSEEYNTSNPD |
| SEQ ID NO: 266 | EVQLVESGGGLVQPGGSLRLSCAASGFTFSSYNMNWVRQAPGKGLEWVS |
| anti-nectin4 HC | YISSSSSTIYYADSVKGRFTISRDNAKNSLSLQMNSLRDEDTAVYYCARAY |
| fused to TIM3 | YYGMDVWGQGTTVTVSSASTKGPSVFPLAPSSKSTSGGTAALGCLVKDYF |
| ECD | PEPVTVSWNSGALTSGVHTFPAVLQSSGLYSLSSVVTVPSSSLGTQTYICNV |
| | NHKPSNTKVDKRVEPKSCDKTHTCPPCPAPELLGGPSVFLFPPKPKDTLMIS |
| | RTPEVTCVVVDVSHEDPEVKFNWYVDGVEVHNAKTKPREEQYNSTYRVV |
| | SVLTVLHQDWLNGKEYKCKVSNKALPAPIEKTISKAKGQPREPQVYTLPPS |
| | REEMTKNQVSLTCLVKGFYPSDIAVEWESNGQPENNYKTTPPVLDSDGSFF |
| | LYSKLTVDKSRWQQGNVFSCSVMHEALHNHYTQKSLSLSPGKGGGGSGG |
| | GGSGGGGSSEVEYRAEVGQNAYLPCFYTPAAPGNLVPVCWGKGACPVFEC |
| | GNVVLRTDERDVNYWTSRYWLNGDFRKGDVSLTIENVTLADSGIYCCRIQI |
| | PGIMNDEKFNLKLVIKPAKVTPAPTRQRDFTAAFPRMLTTRGHGPAETQTL |
| | GSLPDINLTQISTLANELRDSRLANDLRDSGATIRIG |
| SEQ ID NO: 267 | EVQLVESGGGLVQPGGSLRLSCAASGFTFSSYNMNWVRQAPGKGLEWVS |
| anti-nectin4 HC | YISSSSSTIYYADSVKGRFTISRDNAKNSLSLQMNSLRDEDTAVYYCARAY |
| fused to VEGFR | YYGMDVWGQGTTVTVSSASTKGPSVFPLAPSSKSTSGGTAALGCLVKDYF |
| ECD | PEPVTVSWNSGALTSGVHTFPAVLQSSGLYSLSSVVTVPSSSLGTQTYICNV |
| | NHKPSNTKVDKRVEPKSCDKTHTCPPCPAPELLGGPSVFLFPPKPKDTLMIS |
| | RTPEVTCVVVDVSHEDPEVKFNWYVDGVEVHNAKTKPREEQYNSTYRVV |
| | SVLTVLHQDWLNGKEYKCKVSNKALPAPIEKTISKAKGQPREPQVYTLPPS |
| | REEMTKNQVSLTCLVKGFYPSDIAVEWESNGQPENNYKTTPPVLDSDGSFF |
| | LYSKLTVDKSRWQQGNVFSCSVMHEALHNHYTQKSLSLSPGKGGGGSGG |
| | GGSGGGGSSDTGRPFVEMYSEIPEIIHMTEGRELVIPCRVTSPNITVTLKKFP |
| | LDTLIPDGKRIIWDSRKGFIISNATYKEIGLLTCEATVNGHLYKTNYLTHRQT |
| | NTIIDVVLSPSHGIELSVGEKLVLNCTARTELNVGIDFNWEYPSSKHQHKKL |
| | VNRDLKTQSGSEMKKFLSTLTIDGVTRSDQGLYTCAASSGLMTKKNSTFVR |
| | VHEK |
| SEQ ID NO: 268 | QVQLQQWGAGLLKPSETLSLTCAVYGGSFSGYYWSWIRQPPGKGLEWIGE |
| anti-uPAR HC | INHSGSTNYNPSLKSRVTISVDTSKNQFSLKLSSVTAADTAVYYCARGRRFG |
| fused to BTLA | DFDYWGQGTLVTVSSASTKGPSVFPLAPSSKSTSGGTAALGCLVKDYFPEP |
| ECD | VTVSWNSGALTSGVHTFPAVLQSSGLYSLSSVVTVPSSSLGTQTYICNVNH |
| | KPSNTKVDKKVEPKSCDKTHTCPPCPAPELLGGPSVFLFPPKPKDTLMISRT |
| | PEVTCVVVDVSHEDPEVKFNWYVDGVEVHNAKTKPREEQYNSTYRVVSV |
| | LTVLHQDWLNGKEYKCKVSNKALPAPIEKTISKAKGQPREPQVYTLPPSRE |
| | EMTKNQVSLTCLVKGFYPSDIAVEWESNGQPENNYKTTPPVLDSDGSFFLY |
| | SKLTVDKSRWQQGNVFSCSVMHEALHNHYTQKSLSLSPGKGGGGSGGGG |
| | SGGGGSKESCDVQLYIKRQSEHSILAGDPFELECPVKYCANRPHVTWCKLN |
| | GTTCVKLEDRQTSWKEEKNISFFILHFEPVLPNDNGSYRCSANFQSNLIESHS |
| | TTLYVTDVKSASERPSKDEMAS |
| SEQ ID NO: 269 | QVQLQQWGAGLLKPSETLSLTCAVYGGSFSGYYWSWIRQPPGKGLEWIGE |
| anti-uPAR HC | INHSGSTNYNPSLKSRVTISVDTSKNQFSLKLSSVTAADTAVYYCARGRRFG |
| fused to PD1 ECD | DFDYWGQGTLVTVSSASTKGPSVFPLAPSSKSTSGGTAALGCLVKDYFPEP |
| | VTVSWNSGALTSGVHTFPAVLQSSGLYSLSSVVTVPSSSLGTQTYICNVNH |
| | KPSNTKVDKKVEPKSCDKTHTCPPCPAPELLGGPSVFLFPPKPKDTLMISRT |
| | PEVTCVVVDVSHEDPEVKFNWYVDGVEVHNAKTKPREEQYNSTYRVVSV |
| | LTVLHQDWLNGKEYKCKVSNKALPAPIEKTISKAKGQPREPQVYTLPPSRE |
| | EMTKNQVSLTCLVKGFYPSDIAVEWESNGQPENNYKTTPPVLDSDGSFFLY |
| | SKLTVDKSRWQQGNVFSCSVMHEALHNHYTQKSLSLSPGKGGGGSGGGG |
| | SGGGGSPGWFLDSPDRPWNPPTFSPALLVVTEGDNATFTCSFSNTSESFVLN |
| | WYRMSPSNQTDKLAAFPEDRSQPGQDCRFRVTQLPNGRDFHMSVVRARR |
| | NDSGTYLCGAISLAPKAQIKESLRAELRVTERRAEVPTAHPSPSPRPAGQFQ |
| | TLV |
| SEQ ID NO: 270 | QVQLQQWGAGLLKPSETLSLTCAVYGGSFSGYYWSWIRQPPGKGLEWIGE |
| anti-uPAR HC | INHSGSTNYNPSLKSRVTISVDTSKNQFSLKLSSVTAADTAVYYCARGRRFG |
| fused to | DFDYWGQGTLVTVSSASTKGPSVFPLAPSSKSTSGGTAALGCLVKDYFPEP |
| SIGLEC10 ECD | VTVSWNSGALTSGVHTFPAVLQSSGLYSLSSVVTVPSSSLGTQTYICNVNH |
| | KPSNTKVDKKVEPKSCDKTHTCPPCPAPELLGGPSVFLFPPKPKDTLMISRT |
| | PEVTCVVVDVSHEDPEVKFNWYVDGVEVHNAKTKPREEQYNSTYRVVSV |
| | LTVLHQDWLNGKEYKCKVSNKALPAPIEKTISKAKGQPREPQVYTLPPSRE |
| | EMTKNQVSLTCLVKGFYPSDIAVEWESNGQPENNYKTTPPVLDSDGSFFLY |
| | SKLTVDKSRWQQGNVFSCSVMHEALHNHYTQKSLSLSPGKGGGGSGGGG |
| | SGGGGSMDGRFWIRVQESVMVPEGLCISVPCSFSYPRQDWTGSTPAYGYW |
| | FKAVTETTKGAPVATNHQSREVEMSTRGRFQLTGDPAKGNCSLVIRDAQM |
| | QDESQYFFRVERGSYVRYNFMNDGFFLKVTALTQKPDVYIPETLEPGQPVT |
| | VICVFNWAFEECPPPSFSWTGAALSSQGTKPTTSHFSVLSFTPRPQDHNTDL |
| | TCHVDFSRKGVSAQRTVRLRVAYAPRDLVISISRDNTPALEPQPQGNVPYL |
| | EAQKGQFLRLLCAADSQPPATLSWVLQNRVLSSSHPWGPRPLGLELPGVK |
| | AGDSGRYTCRAENRLGSQQRALDLSVQYPPENLRVMVSQANRTVLENLG |
| | NGTSLPVLEGQSLCLVCVTHSSPPARLSWTQRGQVLSPSQPSDPGVLELPRV |
| | QVEHEGEFTCHARHPLGSQHVSLSLSVHYSPKLLGPSCSWEAEGLHCSCSS |
| | QASPAPSLRWWLGEELLEGNSSQDSFEVTPSSAGPWANSSLSLHGGLSSGL |
| | RLRCEAWNVHGAQSGSILQLPDKKGLIST |
| SEQ ID NO: 271 | QVQLQQWGAGLLKPSETLSLTCAVYGGSFSGYYWSWIRQPPGKGLEWIGE |
| anti-uPA RHC | INHSGSTNYNPSLKSRVTISVDTSKNQFSLKLSSVTAADTAVYYCARGRRFG |
| fused to SIRPa | DFDYWGQGTLVTVSSASTKGPSVFPLAPSSKSTSGGTAALGCLVKDYFPEP |
| ECD | VTVSWNSGALTSGVHTFPAVLQSSGLYSLSSVVTVPSSSLGTQTYICNVNH |
| | KPSNTKVDKKVEPKSCDKTHTCPPCPAPELLGGPSVFLFPPKPKDTLMISRT |
| | PEVTCVVVDVSHEDPEVKFNWYVDGVEVHNAKTKPREEQYNSTYRVVSV |
| | LTVLHQDWLNGKEYKCKVSNKALPAPIEKTISKAKGQPREPQVYTLPPSRE |
| | EMTKNQVSLTCLVKGFYPSDIAVEWESNGQPENNYKTTPPVLDSDGSFFLY |
| | SKLTVDKSRWQQGNVFSCSVMHEALHNHYTQKSLSLSPGKGGGGSGGGG |
| | SGGGGSEEELQVIQPDKSVLVAAGETATLRCTATSLIPVGPIQWFRGAGPGR |
| | ELIYNQKEGHFPRVTTVSDLTKRNNMDFSIRIGNITPADAGTYYCVKFRKGS |
| | PDDVEFKSGAGTELSVRAKPS |
| SEQ ID NO: 272 | QVQLQQWGAGLLKPSETLSLTCAVYGGSFSGYYWSWIRQPPGKGLEWIGE |
| anti-uPAR HC | INHSGSTNYNPSLKSRVTISVDTSKNQFSLKLSSVTAADTAVYYCARGRRFG |
| fused to TGFbR | DFDYWGQGTLVTVSSASTKGPSVFPLAPSSKSTSGGTAALGCLVKDYFPEP |
| ECD | VTVSWNSGALTSGVHTFPAVLQSSGLYSLSSVVTVPSSSLGTQTYICNVNH |
| | KPSNTKVDKKVEPKSCDKTHTCPPCPAPELLGGPSVFLFPPKPKDTLMISRT |
| | PEVTCVVVDVSHEDPEVKFNWYVDGVEVHNAKTKPREEQYNSTYRVVSV |
| | LTVLHQDWLNGKEYKCKVSNKALPAPIEKTISKAKGQPREPQVYTLPPSRE |
| | EMTKNQVSLTCLVKGFYPSDIAVEWESNGQPENNYKTTPPVLDSDGSFFLY |
| | SKLTVDKSRWQQGNVFSCSVMHEALHNHYTQKSLSLSPGKGGGGSGGGG |
| | SGGGGSTIPPHVQKSVNNDMIVTDNNGAVKFPQLCKFCDVRFSTCDNQKS |
| | CMSNCSITSICEKPQEVCVAVWRKNDENITLETVCHDPKLPYHDFILEDAAS |
| | PKCIMKEKKKPGETFFMCSCSSDECNDNIIFSEEYNTSNPD |
| SEQ ID NO: 273 | QVQLQQWGAGLLKPSETLSLTCAVYGGSFSGYYWSWIRQPPGKGLEWIGE |
| anti-uPAR HC | INHSGSTNYNPSLKSRVTISVDTSKNQFSLKLSSVTAADTAVYYCARGRRFG |
| fused to TIM3 | DFDYWGQGTLVTVSSASTKGPSVFPLAPSSKSTSGGTAALGCLVKDYFPEP |
| ECD | VTVSWNSGALTSGVHTFPAVLQSSGLYSLSSVVTVPSSSLGTQTYICNVNH |
| | KPSNTKVDKKVEPKSCDKTHTCPPCPAPELLGGPSVFLFPPKPKDTLMISRT |
| | PEVTCVVVDVSHEDPEVKFNWYVDGVEVHNAKTKPREEQYNSTYRVVSV |
| | LTVLHQDWLNGKEYKCKVSNKALPAPIEKTISKAKGQPREPQVYTLPPSRE |
| | EMTKNQVSLTCLVKGFYPSDIAVEWESNGQPENNYKTTPPVLDSDGSFFLY |
| | SKLTVDKSRWQQGNVFSCSVMHEALHNHYTQKSLSLSPGKGGGGSGGGG |
| | SGGGGSSEVEYRAEVGQNAYLPCFYTPAAPGNLVPVCWGKGACPVFECGN |
| | VVLRTDERDVNYWTSRYWLNGDFRKGDVSLTIENVTLADSGIYCCRIQIPG |
| | IMNDEKFNLKLVIKPAKVTPAPTRQRDFTAAFPRMLTTRGHGPAETQTLGS |
| | LPDINLTQISTLANELRDSRLANDLRDSGATIRIG |
| SEQ ID NO: 274 | QVQLQQWGAGLLKPSETLSLTCAVYGGSFSGYYWSWIRQPPGKGLEWIGE |
| anti-uPAR HC | INHSGSTNYNPSLKSRVTISVDTSKNQFSLKLSSVTAADTAVYYCARGRRFG |
| fused to VEGFR | DFDYWGQGTLVTVSSASTKGPSVFPLAPSSKSTSGGTAALGCLVKDYFPEP |
| ECD | VTVSWNSGALTSGVHTFPAVLQSSGLYSLSSVVTVPSSSLGTQTYICNVNH |
| | KPSNTKVDKKVEPKSCDKTHTCPPCPAPELLGGPSVFLFPPKPKDTLMISRT |
| | PEVTCVVVDVSHEDPEVKFNWYVDGVEVHNAKTKPREEQYNSTYRVVSV |
| | LTVLHQDWLNGKEYKCKVSNKALPAPIEKTISKAKGQPREPQVYTLPPSRE |
| | EMTKNQVSLTCLVKGFYPSDIAVEWESNGQPENNYKTTPPVLDSDGSFFLY |
| | SKLTVDKSRWQQGNVFSCSVMHEALHNHYTQKSLSLSPGKGGGGSGGGG |
| | SGGGGSSDTGRPFVEMYSEIPEIIHMTEGRELVIPCRVTSPNITVTLKKFPLDT |
| | LIPDGKRIIWDSRKGFIISNATYKEIGLLTCEATVNGHLYKTNYLTHRQTNTI |
| | IDVVLSPSHGIELSVGEKLVLNCTARTELNVGIDFNWEYPSSKHQHKKLVN |
| | RDLKTQSGSEMKKFLSTLTIDGVTRSDQGLYTCAASSGLMTKKNSTFVRVH |
| | EK |
| SEQ ID NO: 275 | QVQLVESGGGVVQPGRSLRLSCAASGFAFSRYGMHWVRQAPGKGLEWVA |
| anti-PSMA HC | VIWYDGSNKYYADSVKGRFTISRDNSKNTQYLQMNSLRAEDTAVYYCAR |
| fused to BTLA | GGDFLYYYYYGMDVWGQGTTVTVSSASTKGPSVFPLAPSSKSTSGGTAAL |
| ECD | GCLVKDYFPEPVTVSWNSGALTSGVHTFPAVLQSSGLYSLSSVVTVPSSSL |
| | GTQTYICNVNHKPSNTKVDKKVEPKSCDKTHTCPPCPAPELLGGPSVFLFPP |
| | KPKDTLMISRTPEVTCVVVDVSHEDPEVKFNWYVDGVEVHNAKTKPREEQ |
| | YNSTYRVVSVLTVLHQDWLNGKEYKCKVSNKALPAPIEKTISKAKGQPRE |
| | PQVYTLPPSREEMTKNQVSLTCLVKGFYPSDIAVEWESNGQPENNYKTTPP |
| | VLDSDGSFFLYSKLTVDKSRWQQGNVFSCSVMHEALHNHYTQKSLSLSPG |
| | KGGGGSGGGGSGGGGSKESCDVQLYIKRQSEHSILAGDPFELECPVKYCAN |
| | RPHVTWCKLNGTTCVKLEDRQTSWKEEKNISFFILHFEPVLPNDNGSYRCS |
| | ANFQSNLIESHSTTLYVTDVKSASERPSKDEMAS |
| SEQ ID NO: 276 | QVQLVESGGGVVQPGRSLRLSCAASGFAFSRYGMHWVRQAPGKGLEWVA |
| anti-PSMA HC | VIWYDGSNKYYADSVKGRFTISRDNSKNTQYLQMNSLRAEDTAVYYCAR |
| fused to PD1 ECD | GGDFLYYYYYGMDVWGQGTTVTVSSASTKGPSVFPLAPSSKSTSGGTAAL |
| | GCLVKDYFPEPVTVSWNSGALTSGVHTFPAVLQSSGLYSLSSVVTVPSSSL |
| | GTQTYICNVNHKPSNTKVDKKVEPKSCDKTHTCPPCPAPELLGGPSVFLFPP |
| | KPKDTLMISRTPEVTCVVVDVSHEDPEVKFNWYVDGVEVHNAKTKPREEQ |
| | YNSTYRVVSVLTVLHQDWLNGKEYKCKVSNKALPAPIEKTISKAKGQPRE |
| | PQVYTLPPSREEMTKNQVSLTCLVKGFYPSDIAVEWESNGQPENNYKTTPP |
| | VLDSDGSFFLYSKLTVDKSRWQQGNVFSCSVMHEALHNHYTQKSLSLSPG |
| | KGGGGSGGGGSGGGGSPGWFLDSPDRPWNPPTFSPALLVVTEGDNATFTC |
| | SFSNTSESFVLNWYRMSPSNQTDKLAAFPEDRSQPGQDCRFRVTQLPNGRD |
| | FHMSVVRARRNDSGTYLCGAISLAPKAQIKESLRAELRVTERRAEVPTAHP |
| | SPSPRPAGQFQTLV |
| SEQ ID NO: 277 | QVQLVESGGGVVQPGRSLRLSCAASGFAFSRYGMHWVRQAPGKGLEWVA |
| anti-PSMA HC | VIWYDGSNKYYADSVKGRFTISRDNSKNTQYLQMNSLRAEDTAVYYCAR |
| fused to | GGDFLYYYYYGMDVWGQGTTVTVSSASTKGPSVFPLAPSSKSTSGGTAAL |
| SIGLEC10 ECD | GCLVKDYFPEPVTVSWNSGALTSGVHTFPAVLQSSGLYSLSSVVTVPSSSL |
| | GTQTYICNVNHKPSNTKVDKKVEPKSCDKTHTCPPCPAPELLGGPSVFLFPP |
| | KPKDTLMISRTPEVTCVVVDVSHEDPEVKFNWYVDGVEVHNAKTKPREEQ |
| | YNSTYRVVSVLTVLHQDWLNGKEYKCKVSNKALPAPIEKTISKAKGQPRE |
| | PQVYTLPPSREEMTKNQVSLTCLVKGFYPSDIAVEWESNGQPENNYKTTPP |
| | VLDSDGSFFLYSKLTVDKSRWQQGNVFSCSVMHEALHNHYTQKSLSLSPG |
| | KGGGGSGGGGSGGGGSMDGRFWIRVQESVMVPEGLCISVPCSFSYPRQDW |
| | TGSTPAYGYWFKAVTETTKGAPVATNHQSREVEMSTRGRFQLTGDPAKG |
| | NCSLVIRDAQMQDESQYFFRVERGSYVRYNFMNDGFFLKVTALTQKPDVY |
| | IPETLEPGQPVTVICVFNWAFEECPPPSFSWTGAALSSQGTKPTTSHFSVLSF |
| | TPRPQDHNTDLTCHVDFSRKGVSAQRTVRLRVAYAPRDLVISISRDNTPAL |
| | EPQPQGNVPYLEAQKGQFLRLLCAADSQPPATLSWVLQNRVLSSSHPWGP |
| | RPLGLELPGVKAGDSGRYTCRAENRLGSQQRALDLSVQYPPENLRVMVSQ |
| | ANRTVLENLGNGTSLPVLEGQSLCLVCVTHSSPPARLSWTQRGQVLSPSQP |
| | SDPGVLELPRVQVEHEGEFTCHARHPLGSQHVSLSLSVHYSPKLLGPSCSW |
| | EAEGLHCSCSSQASPAPSLRWWLGEELLEGNSSQDSFEVTPSSAGPWANSS |
| | LSLHGGLSSGLRLRCEAWNVHGAQSGSILQLPDKKGLIST |
| SEQ ID NO: 278 | QVQLVESGGGVVQPGRSLRLSCAASGFAFSRYGMHWVRQAPGKGLEWVA |
| anti-PSMA HC | VIWYDGSNKYYADSVKGRFTISRDNSKNTQYLQMNSLRAEDTAVYYCAR |
| fused to SIRPa | GGDFLYYYYYGMDVWGQGTTVTVSSASTKGPSVFPLAPSSKSTSGGTAAL |
| ECD | GCLVKDYFPEPVTVSWNSGALTSGVHTFPAVLQSSGLYSLSSVVTVPSSSL |
| | GTQTYICNVNHKPSNTKVDKKVEPKSCDKTHTCPPCPAPELLGGPSVFLFPP |
| | KPKDTLMISRTPEVTCVVVDVSHEDPEVKFNWYVDGVEVHNAKTKPREEQ |
| | YNSTYRVVSVLTVLHQDWLNGKEYKCKVSNKALPAPIEKTISKAKGQPRE |
| | PQVYTLPPSREEMTKNQVSLTCLVKGFYPSDIAVEWESNGQPENNYKTTPP |
| | VLDSDGSFFLYSKLTVDKSRWQQGNVFSCSVMHEALHNHYTQKSLSLSPG |
| | KGGGGSGGGGSGGGGSEEELQVIQPDKSVLVAAGETATLRCTATSLIPVGPI |
| | QWFRGAGPGRELIYNQKEGHFPRVTTVSDLTKRNNMDFSIRIGNITPADAG |
| | TYYCVKFRKGSPDDVEFKSGAGTELSVRAKPS |
| SEQ ID NO: 279 | QVQLVESGGGVVQPGRSLRLSCAASGFAFSRYGMHWVRQAPGKGLEWVA |
| anti-PSMA HC | VIWYDGSNKYYADSVKGRFTISRDNSKNTQYLQMNSLRAEDTAVYYCAR |
| fused to TGFbR | GGDFLYYYYYGMDVWGQGTTVTVSSASTKGPSVFPLAPSSKSTSGGTAAL |
| ECD | GCLVKDYFPEPVTVSWNSGALTSGVHTFPAVLQSSGLYSLSSVVTVPSSSL |
| | GTQTYICNVNHKPSNTKVDKKVEPKSCDKTHTCPPCPAPELLGGPSVFLFPP |
| | KPKDTLMISRTPEVTCVVVDVSHEDPEVKFNWYVDGVEVHNAKTKPREEQ |
| | YNSTYRVVSVLTVLHQDWLNGKEYKCKVSNKALPAPIEKTISKAKGQPRE |
| | PQVYTLPPSREEMTKNQVSLTCLVKGFYPSDIAVEWESNGQPENNYKTTPP |
| | VLDSDGSFFLYSKLTVDKSRWQQGNVFSCSVMHEALHNHYTQKSLSLSPG |
| | KGGGGSGGGGSGGGGSTIPPHVQKSVNNDMIVTDNNGAVKFPQLCKFCDV |
| | RFSTCDNQKSCMSNCSITSICEKPQEVCVAVWRKNDENITLETVCHDPKLP |
| | YHDFILEDAASPKCIMKEKKKPGETFFMCSCSSDECNDNIIFSEEYNTSNPD |
| SEQ ID NO: 280 | QVQLVESGGGVVQPGRSLRLSCAASGFAFSRYGMHWVRQAPGKGLEWVA |
| anti-PSMA HC | VIWYDGSNKYYADSVKGRFTISRDNSKNTQYLQMNSLRAEDTAVYYCAR |
| fused to TIM3 | GGDFLYYYYYGMDVWGQGTTVTVSSASTKGPSVFPLAPSSKSTSGGTAAL |
| ECD | GCLVKDYFPEPVTVSWNSGALTSGVHTFPAVLQSSGLYSLSSVVTVPSSSL |
| | GTQTYICNVNHKPSNTKVDKKVEPKSCDKTHTCPPCPAPELLGGPSVFLFPP |
| | KPKDTLMISRTPEVTCVVVDVSHEDPEVKFNWYVDGVEVHNAKTKPREEQ |
| | YNSTYRVVSVLTVLHQDWLNGKEYKCKVSNKALPAPIEKTISKAKGQPRE |
| | PQVYTLPPSREEMTKNQVSLTCLVKGFYPSDIAVEWESNGQPENNYKTTPP |
| | VLDSDGSFFLYSKLTVDKSRWQQGNVFSCSVMHEALHNHYTQKSLSLSPG |
| | KGGGGSGGGGSGGGGSSEVEYRAEVGQNAYLPCFYTPAAPGNLVPVCWG |
| | KGACPVFECGNVVLRTDERDVNYWTSRYWLNGDFRKGDVSLTIENVTLA |
| | DSGIYCCRIQIPGIMNDEKFNLKLVIKPAKVTPAPTRQRDFTAAFPRMLTTR |
| | GHGPAETQTLGSLPDINLTQISTLANELRDSRLANDLRDSGATIRIG |
| SEQ ID NO: 281 | QVQLVESGGGVVQPGRSLRLSCAASGFAFSRYGMHWVRQAPGKGLEWVA |
| anti-PSMA HC | VIWYDGSNKYYADSVKGRFTISRDNSKNTQYLQMNSLRAEDTAVYYCAR |
| fused to VEGFR | GGDFLYYYYYGMDVWGQGTTVTVSSASTKGPSVFPLAPSSKSTSGGTAAL |
| ECD | GCLVKDYFPEPVTVSWNSGALTSGVHTFPAVLQSSGLYSLSSVVTVPSSSL |
| | GTQTYICNVNHKPSNTKVDKKVEPKSCDKTHTCPPCPAPELLGGPSVFLFPP |
| | KPKDTLMISRTPEVTCVVVDVSHEDPEVKFNWYVDGVEVHNAKTKPREEQ |
| | YNSTYRVVSVLTVLHQDWLNGKEYKCKVSNKALPAPIEKTISKAKGQPRE |
| | PQVYTLPPSREEMTKNQVSLTCLVKGFYPSDIAVEWESNGQPENNYKTTPP |
| | VLDSDGSFFLYSKLTVDKSRWQQGNVFSCSVMHEALHNHYTQKSLSLSPG |
| | KGGGGSGGGGSGGGGSSDTGRPFVEMYSEIPEIIHMTEGRELVIPCRVTSPNI |
| | TVTLKKFPLDTLIPDGKRIIWDSRKGFIISNATYKEIGLLTCEATVNGHLYKT |
| | NYLTHRQTNTIIDVVLSPSHGIELSVGEKLVLNCTARTELNVGIDFNWEYPS |
| | SKHQHKKLVNRDLKTQSGSEMKKFLSTLTIDGVTRSDQGLYTCAASSGLM |
| | TKKNSTFVRVHEK |
| SEQ ID NO: 282 | EVQLVESGGGVVQPGRSLRLSCSASGFDFTTYWMSWVRQAPGKGLEWIGE |
| anti-CEACAM5 | IHPDSSTINYAPSLKDRFTISRDNAKNTLFLQMDSLRPEDTGVYFCASLYFGF |
| HC fused to | PWFAYWGQGTPVTVSSASTKGPSVFPLAPSSKSTSGGTAALGCLVKDYFPE |
| BTLAECD | PVTVSWNSGALTSGVHTFPAVLQSSGLYSLSSVVTVPSSSLGTQTYICNVNH |
| | KPSNTKVDKRVEPKSCDKTHTCPPCPAPELLGGPSVFLFPPKPKDTLMISRT |
| | PEVTCVVVDVSHEDPEVKFNWYVDGVEVHNAKTKPREEQYNSTYRVVSV |
| | LTVLHQDWLNGKEYKCKVSNKALPAPIEKTISKAKGQPREPQVYTLPPSRE |
| | EMTKNQVSLTCLVKGFYPSDIAVEWESNGQPENNYKTTPPVLDSDGSFFLY |
| | SKLTVDKSRWQQGNVFSCSVMHEALHNHYTQKSLSLSPGKGGGGSGGGG |
| | SGGGGSKESCDVQLYIKRQSEHSILAGDPFELECPVKYCANRPHVTWCKLN |
| | GTTCVKLEDRQTSWKEEKNISFFILHFEPVLPNDNGSYRCSANFQSNLIESHS |
| | TTLYVTDVKSASERPSKDEMAS |
| SEQ ID NO: 283 | EVQLVESGGGVVQPGRSLRLSCSASGFDFTTYWMSWVRQAPGKGLEWIGE |
| anti-CEACAM5 | IHPDSSTINYAPSLKDRFTISRDNAKNTLFLQMDSLRPEDTGVYFCASLYFGF |
| HC fused to PD1 | PWFAYWGQGTPVTVSSASTKGPSVFPLAPSSKSTSGGTAALGCLVKDYFPE |
| ECD | PVTVSWNSGALTSGVHTFPAVLQSSGLYSLSSVVTVPSSSLGTQTYICNVNH |
| | KPSNTKVDKRVEPKSCDKTHTCPPCPAPELLGGPSVFLFPPKPKDTLMISRT |
| | PEVTCVVVDVSHEDPEVKFNWYVDGVEVHNAKTKPREEQYNSTYRVVSV |
| | LTVLHQDWLNGKEYKCKVSNKALPAPIEKTISKAKGQPREPQVYTLPPSRE |
| | EMTKNQVSLTCLVKGFYPSDIAVEWESNGQPENNYKTTPPVLDSDGSFFLY |
| | SKLTVDKSRWQQGNVFSCSVMHEALHNHYTQKSLSLSPGKGGGGSGGGG |
| | SGGGGSPGWFLDSPDRPWNPPTFSPALLVVTEGDNATFTCSFSNTSESFVLN |
| | WYRMSPSNQTDKLAAFPEDRSQPGQDCRFRVTQLPNGRDFHMSVVRARR |
| | NDSGTYLCGAISLAPKAQIKESLRAELRVTERRAEVPTAHPSPSPRPAGQFQ |
| | TLV |
| SEQ ID NO: 284 | EVQLVESGGGVVQPGRSLRLSCSASGFDFTTYWMSWVRQAPGKGLEWIGE |
| anti-CEACAM5 | IHPDSSTINYAPSLKDRFTISRDNAKNTLFLQMDSLRPEDTGVYFCASLYFGF |
| HC fused to | PWFAYWGQGTPVTVSSASTKGPSVFPLAPSSKSTSGGTAALGCLVKDYFPE |
| SIGLEC10 ECD | PVTVSWNSGALTSGVHTFPAVLQSSGLYSLSSVVTVPSSSLGTQTYICNVNH |
| | KPSNTKVDKRVEPKSCDKTHTCPPCPAPELLGGPSVFLFPPKPKDTLMISRT |
| | PEVTCVVVDVSHEDPEVKFNWYVDGVEVHNAKTKPREEQYNSTYRVVSV |
| | LTVLHQDWLNGKEYKCKVSNKALPAPIEKTISKAKGQPREPQVYTLPPSRE |
| | EMTKNQVSLTCLVKGFYPSDIAVEWESNGQPENNYKTTPPVLDSDGSFFLY |
| | SKLTVDKSRWQQGNVFSCSVMHEALHNHYTQKSLSLSPGKGGGGSGGGG |
| | SGGGGSMDGRFWIRVQESVMVPEGLCISVPCSFSYPRQDWTGSTPAYGYW |
| | FKAVTETTKGAPVATNHQSREVEMSTRGRFQLTGDPAKGNCSLVIRDAQM |
| | QDESQYFFRVERGSYVRYNFMNDGFFLKVTALTQKPDVYIPETLEPGQPVT |
| | VICVFNWAFEECPPPSFSWTGAALSSQGTKPTTSHFSVLSFTPRPQDHNTDL |
| | TCHVDFSRKGVSAQRTVRLRVAYAPRDLVISISRDNTPALEPQPQGNVPYL |
| | EAQKGQFLRLLCAADSQPPATLSWVLQNRVLSSSHPWGPRPLGLELPGVK |
| | AGDSGRYTCRAENRLGSQQRALDLSVQYPPENLRVMVSQANRTVLENLG |
| | NGTSLPVLEGQSLCLVCVTHSSPPARLSWTQRGQVLSPSQPSDPGVLELPRV |
| | QVEHEGEFTCHARHPLGSQHVSLSLSVHYSPKLLGPSCSWEAEGLHCSCSS |
| | QASPAPSLRWWLGEELLEGNSSQDSFEVTPSSAGPWANSSLSLHGGLSSGL |
| | RLRCEAWNVHGAQSGSILQLPDKKGLIST |
| SEQ ID NO: 285 | EVQLVESGGGVVQPGRSLRLSCSASGFDFTTYWMSWVRQAPGKGLEWIGE |
| anti-CEACAM5 | IHPDSSTINYAPSLKDRFTISRDNAKNTLFLQMDSLRPEDTGVYFCASLYFGF |
| HC fused to | PWFAYWGQGTPVTVSSASTKGPSVFPLAPSSKSTSGGTAALGCLVKDYFPE |
| SIRPa ECD | PVTVSWNSGALTSGVHTFPAVLQSSGLYSLSSVVTVPSSSLGTQTYICNVNH |
| | KPSNTKVDKRVEPKSCDKTHTCPPCPAPELLGGPSVFLFPPKPKDTLMISRT |
| | PEVTCVVVDVSHEDPEVKFNWYVDGVEVHNAKTKPREEQYNSTYRVVSV |
| | LTVLHQDWLNGKEYKCKVSNKALPAPIEKTISKAKGQPREPQVYTLPPSRE |
| | EMTKNQVSLTCLVKGFYPSDIAVEWESNGQPENNYKTTPPVLDSDGSFFLY |
| | SKLTVDKSRWQQGNVFSCSVMHEALHNHYTQKSLSLSPGKGGGGSGGGG |
| | SGGGGSEEELQVIQPDKSVLVAAGETATLRCTATSLIPVGPIQWFRGAGPGR |
| | ELIYNQKEGHFPRVTTVSDLTKRNNMDFSIRIGNITPADAGTYYCVKFRKGS |
| | PDDVEFKSGAGTELSVRAKPS |
| SEQ ID NO: 286 | EVQLVESGGGVVQPGRSLRLSCSASGFDFTTYWMSWVRQAPGKGLEWIGE |
| anti-CEACAM5 | IHPDSSTINYAPSLKDRFTISRDNAKNTLFLQMDSLRPEDTGVYFCASLYFGF |
| HC fused to | PWFAYWGQGTPVTVSSASTKGPSVFPLAPSSKSTSGGTAALGCLVKDYFPE |
| TGFbR ECD | PVTVSWNSGALTSGVHTFPAVLQSSGLYSLSSVVTVPSSSLGTQTYICNVNH |
| | KPSNTKVDKRVEPKSCDKTHTCPPCPAPELLGGPSVFLFPPKPKDTLMISRT |
| | PEVTCVVVDVSHEDPEVKFNWYVDGVEVHNAKTKPREEQYNSTYRVVSV |
| | LTVLHQDWLNGKEYKCKVSNKALPAPIEKTISKAKGQPREPQVYTLPPSRE |
| | EMTKNQVSLTCLVKGFYPSDIAVEWESNGQPENNYKTTPPVLDSDGSFFLY |
| | SKLTVDKSRWQQGNVFSCSVMHEALHNHYTQKSLSLSPGKGGGGSGGGG |
| | SGGGGSTIPPHVQKSVNNDMIVTDNNGAVKFPQLCKFCDVRFSTCDNQKS |
| | CMSNCSITSICEKPQEVCVAVWRKNDENITLETVCHDPKLPYHDFILEDAAS |
| | PKCIMKEKKKPGETFFMCSCSSDECNDNIIFSEEYNTSNPD |
| SEQ ID NO: 287 | EVQLVESGGGVVQPGRSLRLSCSASGFDFTTYWMSWVRQAPGKGLEWIGE |
| anti-CEACAM5 | IHPDSSTINYAPSLKDRFTISRDNAKNTLFLQMDSLRPEDTGVYFCASLYFGF |
| HC fused to TIM3 | PWFAYWGQGTPVTVSSASTKGPSVFPLAPSSKSTSGGTAALGCLVKDYFPE |
| ECD | PVTVSWNSGALTSGVHTFPAVLQSSGLYSLSSVVTVPSSSLGTQTYICNVNH |
| | KPSNTKVDKRVEPKSCDKTHTCPPCPAPELLGGPSVFLFPPKPKDTLMISRT |
| | PEVTCVVVDVSHEDPEVKFNWYVDGVEVHNAKTKPREEQYNSTYRVVSV |
| | LTVLHQDWLNGKEYKCKVSNKALPAPIEKTISKAKGQPREPQVYTLPPSRE |
| | EMTKNQVSLTCLVKGFYPSDIAVEWESNGQPENNYKTTPPVLDSDGSFFLY |
| | SKLTVDKSRWQQGNVFSCSVMHEALHNHYTQKSLSLSPGKGGGGSGGGG |
| | SGGGGSSEVEYRAEVGQNAYLPCFYTPAAPGNLVPVCWGKGACPVFECGN |
| | VVLRTDERDVNYWTSRYWLNGDFRKGDVSLTIENVTLADSGIYCCRIQIPG |
| | IMNDEKFNLKLVIKPAKVTPAPTRQRDFTAAFPRMLTTRGHGPAETQTLGS |
| | LPDINLTQISTLANELRDSRLANDLRDSGATIRIG |
| SEQ ID NO: 288 | EVQLVESGGGVVQPGRSLRLSCSASGFDFTTYWMSWVRQAPGKGLEWIGE |
| anti-CEACAM5 | IHPDSSTINYAPSLKDRFTISRDNAKNTLFLQMDSLRPEDTGVYFCASLYFGF |
| HC fused to | PWFAYWGQGTPVTVSSASTKGPSVFPLAPSSKSTSGGTAALGCLVKDYFPE |
| VEGFR ECD | PVTVSWNSGALTSGVHTFPAVLQSSGLYSLSSVVTVPSSSLGTQTYICNVNH |
| | KPSNTKVDKRVEPKSCDKTHTCPPCPAPELLGGPSVFLFPPKPKDTLMISRT |
| | PEVTCVVVDVSHEDPEVKFNWYVDGVEVHNAKTKPREEQYNSTYRVVSV |
| | LTVLHQDWLNGKEYKCKVSNKALPAPIEKTISKAKGQPREPQVYTLPPSRE |
| | EMTKNQVSLTCLVKGFYPSDIAVEWESNGQPENNYKTTPPVLDSDGSFFLY |
| | SKLTVDKSRWQQGNVFSCSVMHEALHNHYTQKSLSLSPGKGGGGSGGGG |
| | SGGGGSSDTGRPFVEMYSEIPEIIHMTEGRELVIPCRVTSPNITVTLKKFPLDT |
| | LIPDGKRIIWDSRKGFIISNATYKEIGLLTCEATVNGHLYKTNYLTHRQTNTI |
| | IDVVLSPSHGIELSVGEKLVLNCTARTELNVGIDFNWEYPSSKHQHKKLVN |
| | RDLKTQSGSEMKKFLSTLTIDGVTRSDQGLYTCAASSGLMTKKNSTFVRVH |
| | EK |
| SEQ ID NO: 289 | EVQLLESGGGLVQPGGSLRLSCAVSGFTFNSFAMSWVRQAPGKGLEWVSA |
| anti-CD38 HC | ISGSGGGTYYADSVKGRFTISRDNSKNTLYLQMNSLRAEDTAVYFCAKDKI |
| fused to BTLA | LWFGEPVFDYWGQGTLVTVSSASTKGPSVFPLAPSSKSTSGGTAALGCLVK |
| ECD | DYFPEPVTVSWNSGALTSGVHTFPAVLQSSGLYSLSSVVTVPSSSLGTQTYI |
| | CNVNHKPSNTKVDKRVEPKSCDKTHTCPPCPAPELLGGPSVFLFPPKPKDT |
| | LMISRTPEVTCVVVDVSHEDPEVKFNWYVDGVEVHNAKTKPREEQYNSTY |
| | RVVSVLTVLHQDWLNGKEYKCKVSNKALPAPIEKTISKAKGQPREPQVYT |
| | LPPSREEMTKNQVSLTCLVKGFYPSDIAVEWESNGQPENNYKTTPPVLDSD |
| | GSFFLYSKLTVDKSRWQQGNVFSCSVMHEALHNHYTQKSLSLSPGKGGGG |
| | SGGGGSGGGGSKESCDVQLYIKRQSEHSILAGDPFELECPVKYCANRPHVT |
| | WCKLNGTTCVKLEDRQTSWKEEKNISFFILHFEPVLPNDNGSYRCSANFQS |
| | NLIESHSTTLYVTDVKSASERPSKDEMAS |
| SEQ ID NO: 290 | EIVLTQSPATLSLSPGERATLSCRASQSVSSYLAWYQQKPGQAPRLLIYDAS |
| anti-CD38 LC | NRATGIPARFSGSGSGTDFTLTISSLEPEDFAVYYCQQRSNWPPTFGQGTKV |
| fused to PD1 ECD | EIKRTVAAPSVFIFPPSDEQLKSGTASVVCLLNNFYPREAKVQWKVDNALQ |
| | SGNSQESVTEQDSKDSTYSLSSTLTLSKADYEKHKVYACEVTHQGLSSPVT |
| | KSFNRGECGGGGSGGGGSGGGGSPGWFLDSPDRPWNPPTFSPALLVVTEG |
| | DNATFTCSFSNTSESFVLNWYRMSPSNQTDKLAAFPEDRSQPGQDCRFRVT |
| | QLPNGRDFHMSVVRARRNDSGTYLCGAISLAPKAQIKESLRAELRVTERRA |
| | EVPTAHPSPSPRPAGQFQTLV |
| SEQ ID NO: 291 | EIVLTQSPATLSLSPGERATLSCRASQSVSSYLAWYQQKPGQAPRLLIYDAS |
| anti-CD38 LC | NRATGIPARFSGSGSGTDFTLTISSLEPEDFAVYYCQQRSNWPPTFGQGTKV |
| fused to | EIKRTVAAPSVFIFPPSDEQLKSGTASVVCLLNNFYPREAKVQWKVDNALQ |
| SIGLEC10 ECD | SGNSQESVTEQDSKDSTYSLSSTLTLSKADYEKHKVYACEVTHQGLSSPVT |
| | KSFNRGECGGGGSGGGGSGGGGSMDGRFWIRVQESVMVPEGLCISVPCSF |
| | SYPRQDWTGSTPAYGYWFKAVTETTKGAPVATNHQSREVEMSTRGRFQL |
| | TGDPAKGNCSLVIRDAQMQDESQYFFRVERGSYVRYNFMNDGFFLKVTAL |
| | TQKPDVYIPETLEPGQPVTVICVFNWAFEECPPPSFSWTGAALSSQGTKPTT |
| | SHFSVLSFTPRPQDHNTDLTCHVDFSRKGVSAQRTVRLRVAYAPRDLVISIS |
| | RDNTPALEPQPQGNVPYLEAQKGQFLRLLCAADSQPPATLSWVLQNRVLS |
| | SSHPWGPRPLGLELPGVKAGDSGRYTCRAENRLGSQQRALDLSVQYPPEN |
| | LRVMVSQANRTVLENLGNGTSLPVLEGQSLCLVCVTHSSPPARLSWTQRG |
| | QVLSPSQPSDPGVLELPRVQVEHEGEFTCHARHPLGSQHVSLSLSVHYSPKL |
| | LGPSCSWEAEGLHCSCSSQASPAPSLRWWLGEELLEGNSSQDSFEVTPSSA |
| | GPWANSSLSLHGGLSSGLRLRCEAWNVHGAQSGSILQLPDKKGLIST |
| SEQ ID NO: 292 | EIVLTQSPATLSLSPGERATLSCRASQSVSSYLAWYQQKPGQAPRLLIYDAS |
| anti- CD38 LC | NRATGIPARFSGSGSGTDFTLTISSLEPEDFAVYYCQQRSNWPPTFGQGTKV |
| fused to SIRPa | EIKRTVAAPSVFIFPPSDEQLKSGTASVVCLLNNFYPREAKVQWKVDNALQ |
| ECD | SGNSQESVTEQDSKDSTYSLSSTLTLSKADYEKHKVYACEVTHQGLSSPVT |
| | KSFNRGECGGGGSGGGGSGGGGSEEELQVIQPDKSVLVAAGETATLRCTA |
| | TSLIPVGPIQWFRGAGPGRELIYNQKEGHFPRVTTVSDLTKRNNMDFSIRIG |
| | NITPADAGTYYCVKFRKGSPDDVEFKSGAGTELSVRAKPS |
| SEQ ID NO: 293 | EIVLTQSPATLSLSPGERATLSCRASQSVSSYLAWYQQKPGQAPRLLIYDAS |
| anti-CD38 LC | NRATGIPARFSGSGSGTDFTLTISSLEPEDFAVYYCQQRSNWPPTFGQGTKV |
| fused to TIM3 | EIKRTVAAPSVFIFPPSDEQLKSGTASVVCLLNNFYPREAKVQWKVDNALQ |
| ECD | SGNSQESVTEQDSKDSTYSLSSTLTLSKADYEKHKVYACEVTHQGLSSPVT |
| | KSFNRGECGGGGSGGGGSGGGGSSEVEYRAEVGQNAYLPCFYTPAAPGNL |
| | VPVCWGKGACPVFECGNVVLRTDERDVNYWTSRYWLNGDFRKGDVSLTI |
| | ENVTLADSGIYCCRIQIPGIMNDEKFNLKLVIKPAKVTPAPTRQRDFTAAFP |
| | RMLTTRGHGPAETQTLGSLPDINLTQISTLANELRDSRLANDLRDSGATIRI |
| | G |
| SEQ ID NO: 294 | EVQLLESGGGLVQPGGSLRLSCAVSGFTFNSFAMSWVRQAPGKGLEWVSA |
| anti-CD38 HC | ISGSGGGTYYADSVKGRFTISRDNSKNTLYLQMNSLRAEDTAVYFCAKDKI |
| fused to PD1 ECD | LWFGEPVFDYWGQGTLVTVSSASTKGPSVFPLAPSSKSTSGGTAALGCLVK |
| | DYFPEPVTVSWNSGALTSGVHTFPAVLQSSGLYSLSSVVTVPSSSLGTQTYI |
| | CNVNHKPSNTKVDKRVEPKSCDKTHTCPPCPAPELLGGPSVFLFPPKPKDT |
| | LMISRTPEVTCVVVDVSHEDPEVKFNWYVDGVEVHNAKTKPREEQYNSTY |
| | RVVSVLTVLHQDWLNGKEYKCKVSNKALPAPIEKTISKAKGQPREPQVYT |
| | LPPSREEMTKNQVSLTCLVKGFYPSDIAVEWESNGQPENNYKTTPPVLDSD |
| | GSFFLYSKLTVDKSRWQQGNVFSCSVMHEALHNHYTQKSLSLSPGKGGGG |
| | SGGGGSGGGGSPGWFLDSPDRPWNPPTFSPALLVVTEGDNATFTCSFSNTS |
| | ESFVLNWYRMSPSNQTDKLAAFPEDRSQPGQDCRFRVTQLPNGRDFHMSV |
| | VRARRNDSGTYLCGAISLAPKAQIKESLRAELRVTERRAEVPTAHPSPSPRP |
| | AGQFQTLV |
| SEQ ID NO: 295 | EIVLTQSPATLSLSPGERATLSCRASQSVSSYLAWYQQKPGQAPRLLIYDAS |
| anti- CD38 LC | NRATGIPARFSGSGSGTDFTLTISSLEPEDFAVYYCQQRSNWPPTFGQGTKV |
| fused to BTLA | EIKRTVAAPSVFIFPPSDEQLKSGTASVVCLLNNFYPREAKVQWKVDNALQ |
| ECD | SGNSQESVTEQDSKDSTYSLSSTLTLSKADYEKHKVYACEVTHQGLSSPVT |
| | KSFNRGECGGGGSGGGGSGGGGSKESCDVQLYIKRQSEHSILAGDPFELEC |
| | PVKYCANRPHVTWCKLNGTTCVKLEDRQTSWKEEKNISFFILHFEPVLPND |
| | NGSYRCSANFQSNLIESHSTTLYVTDVKSASERPSKDEMAS |
| SEQ ID NO: 296 | EVQLLESGGGLVQPGGSLRLSCAVSGFTFNSFAMSWVRQAPGKGLEWVSA |
| anti-CD38 HC | ISGSGGGTYYADSVKGRFTISRDNSKNTLYLQMNSLRAEDTAVYFCAKDKI |
| fused to | LWFGEPVFDYWGQGTLVTVSSASTKGPSVFPLAPSSKSTSGGTAALGCLVK |
| SIGLEC10 ECD | DYFPEPVTVSWNSGALTSGVHTFPAVLQSSGLYSLSSVVTVPSSSLGTQTYI |
| | CNVNHKPSNTKVDKRVEPKSCDKTHTCPPCPAPELLGGPSVFLFPPKPKDT |
| | LMISRTPEVTCVVVDVSHEDPEVKFNWYVDGVEVHNAKTKPREEQYNSTY |
| | RVVSVLTVLHQDWLNGKEYKCKVSNKALPAPIEKTISKAKGQPREPQVYT |
| | LPPSREEMTKNQVSLTCLVKGFYPSDIAVEWESNGQPENNYKTTPPVLDSD |
| | GSFFLYSKLTVDKSRWQQGNVFSCSVMHEALHNHYTQKSLSLSPGKGGGG |
| | SGGGGSGGGGSMDGRFWIRVQESVMVPEGLCISVPCSFSYPRQDWTGSTP |
| | AYGYWFKAVTETTKGAPVATNHQSREVEMSTRGRFQLTGDPAKGNCSLVI |
| | RDAQMQDESQYFFRVERGSYVRYNFMNDGFFLKVTALTQKPDVYIPETLE |
| | PGQPVTVICVFNWAFEECPPPSFSWTGAALSSQGTKPTTSHFSVLSFTPRPQ |
| | DHNTDLTCHVDFSRKGVSAQRTVRLRVAYAPRDLVISISRDNTPALEPQPQ |
| | GNVPYLEAQKGQFLRLLCAADSQPPATLSWVLQNRVLSSSHPWGPRPLGL |
| | ELPGVKAGDSGRYTCRAENRLGSQQRALDLSVQYPPENLRVMVSQANRTV |
| | LENLGNGTSLPVLEGQSLCLVCVTHSSPPARLSWTQRGQVLSPSQPSDPGV |
| | LELPRVQVEHEGEFTCHARHPLGSQHVSLSLSVHYSPKLLGPSCSWEAEGL |
| | HCSCSSQASPAPSLRWWLGEELLEGNSSQDSFEVTPSSAGPWANSSLSLHG |
| | GLSSGLRLRCEAWNVHGAQSGSILQLPDKKGLIST |
| SEQ ID NO: 297 | EVQLLESGGGLVQPGGSLRLSCAVSGFTFNSFAMSWVRQAPGKGLEWVSA |
| anti-CD38 HC | ISGSGGGTYYADSVKGRFTISRDNSKNTLYLQMNSLRAEDTAVYFCAKDKI |
| fused to SIRPa | LWFGEPVFDYWGQGTLVTVSSASTKGPSVFPLAPSSKSTSGGTAALGCLVK |
| ECD | DYFPEPVTVSWNSGALTSGVHTFPAVLQSSGLYSLSSVVTVPSSSLGTQTYI |
| | CNVNHKPSNTKVDKRVEPKSCDKTHTCPPCPAPELLGGPSVFLFPPKPKDT |
| | LMISRTPEVTCVVVDVSHEDPEVKFNWYVDGVEVHNAKTKPREEQYNSTY |
| | RVVSVLTVLHQDWLNGKEYKCKVSNKALPAPIEKTISKAKGQPREPQVYT |
| | LPPSREEMTKNQVSLTCLVKGFYPSDIAVEWESNGQPENNYKTTPPVLDSD |
| | GSFFLYSKLTVDKSRWQQGNVFSCSVMHEALHNHYTQKSLSLSPGKGGGG |
| | SGGGGSGGGGSEEELQVIQPDKSVLVAAGETATLRCTATSLIPVGPIQWFRG |
| | AGPGRELIYNQKEGHFPRVTTVSDLTKRNNMDFSIRIGNITPADAGTYYCV |
| | KFRKGSPDDVEFKSGAGTELSVRAKPS |
| SEQ ID NO: 298 | EVQLLESGGGLVQPGGSLRLSCAVSGFTFNSFAMSWVRQAPGKGLEWVSA |
| anti-CD38 HC | ISGSGGGTYYADSVKGRFTISRDNSKNTLYLQMNSLRAEDTAVYFCAKDKI |
| fused to TGFbR | LWFGEPVFDYWGQGTLVTVSSASTKGPSVFPLAPSSKSTSGGTAALGCLVK |
| ECD | DYFPEPVTVSWNSGALTSGVHTFPAVLQSSGLYSLSSVVTVPSSSLGTQTYI |
| | CNVNHKPSNTKVDKRVEPKSCDKTHTCPPCPAPELLGGPSVFLFPPKPKDT |
| | LMISRTPEVTCVVVDVSHEDPEVKFNWYVDGVEVHNAKTKPREEQYNSTY |
| | RVVSVLTVLHQDWLNGKEYKCKVSNKALPAPIEKTISKAKGQPREPQVYT |
| | LPPSREEMTKNQVSLTCLVKGFYPSDIAVEWESNGQPENNYKTTPPVLDSD |
| | GSFFLYSKLTVDKSRWQQGNVFSCSVMHEALHNHYTQKSLSLSPGKGGGG |
| | SGGGGSGGGGSTIPPHVQKSVNNDMIVTDNNGAVKFPQLCKFCDVRFSTC |
| | DNQKSCMSNCSITSICEKPQEVCVAVWRKNDENITLETVCHDPKLPYHDFIL |
| | EDAASPKCIMKEKKKPGETFFMCSCSSDECNDNIIFSEEYNTSNPD |
| SEQ ID NO: 299 | EVQLLESGGGLVQPGGSLRLSCAVSGFTFNSFAMSWVRQAPGKGLEWVSA |
| anti-CD38 HC | ISGSGGGTYYADSVKGRFTISRDNSKNTLYLQMNSLRAEDTAVYFCAKDKI |
| fused to TIM3 | LWFGEPVFDYWGQGTLVTVSSASTKGPSVFPLAPSSKSTSGGTAALGCLVK |
| ECD | DYFPEPVTVSWNSGALTSGVHTFPAVLQSSGLYSLSSVVTVPSSSLGTQTYI |
| | CNVNHKPSNTKVDKRVEPKSCDKTHTCPPCPAPELLGGPSVFLFPPKPKDT |
| | LMISRTPEVTCVVVDVSHEDPEVKFNWYVDGVEVHNAKTKPREEQYNSTY |
| | RVVSVLTVLHQDWLNGKEYKCKVSNKALPAPIEKTISKAKGQPREPQVYT |
| | LPPSREEMTKNQVSLTCLVKGFYPSDIAVEWESNGQPENNYKTTPPVLDSD |
| | GSFFLYSKLTVDKSRWQQGNVFSCSVMHEALHNHYTQKSLSLSPGKGGGG |
| | SGGGGSGGGGSSEVEYRAEVGQNAYLPCFYTPAAPGNLVPVCWGKGACP |
| | VFECGNVVLRTDERDVNYWTSRYWLNGDFRKGDVSLTIENVTLADSGIYC |
| | CRIQIPGIMNDEKFNLKLVIKPAKVTPAPTRQRDFTAAFPRMLTTRGHGPAE |
| | TQTLGSLPDINLTQISTLANELRDSRLANDLRDSGATIRIG |
| SEQ ID NO: 300 | EVQLLESGGGLVQPGGSLRLSCAVSGFTFNSFAMSWVRQAPGKGLEWVSA |
| anti-CD38 HC | ISGSGGGTYYADSVKGRFTISRDNSKNTLYLQMNSLRAEDTAVYFCAKDKI |
| fused to VEGFR | LWFGEPVFDYWGQGTLVTVSSASTKGPSVFPLAPSSKSTSGGTAALGCLVK |
| ECD | DYFPEPVTVSWNSGALTSGVHTFPAVLQSSGLYSLSSVVTVPSSSLGTQTYI |
| | CNVNHKPSNTKVDKRVEPKSCDKTHTCPPCPAPELLGGPSVFLFPPKPKDT |
| | LMISRTPEVTCVVVDVSHEDPEVKFNWYVDGVEVHNAKTKPREEQYNSTY |
| | RVVSVLTVLHQDWLNGKEYKCKVSNKALPAPIEKTISKAKGQPREPQVYT |
| | LPPSREEMTKNQVSLTCLVKGFYPSDIAVEWESNGQPENNYKTTPPVLDSD |
| | GSFFLYSKLTVDKSRWQQGNVFSCSVMHEALHNHYTQKSLSLSPGKGGGG |
| | SGGGGSGGGGSSDTGRPFVEMYSEIPEIIHMTEGRELVIPCRVTSPNITVTLK |
| | KFPLDTLIPDGKRIIWDSRKGFIISNATYKEIGLLTCEATVNGHLYKTNYLTH |
| | RQTNTIIDVVLSPSHGIELSVGEKLVLNCTARTELNVGIDFNWEYPSSKHQH |
| | KKLVNRDLKTQSGSEMKKFLSTLTIDGVTRSDQGLYTCAASSGLMTKKNS |
| | TFVRVHEK |
| SEQ ID NO: 301 | EVQLVESGGGLVQPGGSLRLSCAASGFDFSRYWMSWVRQAPGKGLEWIG |
| anti-SLAMF7 | EINPDSSTINYAPSLKDKFIISRDNAKNSLYLQMNSLRAEDTAVYYCARPDG |
| HC fused to | NYWYFDVWGQGTLVTVSSASTKGPSVFPLAPSSKSTSGGTAALGCLVKDY |
| BTLA ECD | FPEPVTVSWNSGALTSGVHTFPAVLQSSGLYSLSSVVTVPSSSLGTQTYICN |
| | VNHKPSNTKVDKKVEPKSCDKTHTCPPCPAPELLGGPSVFLFPPKPKDTLMI |
| | SRTPEVTCVVVDVSHEDPEVKFNWYVDGVEVHNAKTKPREEQYNSTYRV |
| | VSVLTVLHQDWLNGKEYKCKVSNKALPAPIEKTISKAKGQPREPQVYTLPP |
| | SRDELTKNQVSLTCLVKGFYPSDIAVEWESNGQPENNYKTTPPVLDSDGSF |
| | FLYSKLTVDKSRWQQGNVFSCSVMHEALHNHYTQKSLSLSPGKGGGGSG |
| | GGGSGGGGSKESCDVQLYIKRQSEHSILAGDPFELECPVKYCANRPHVTWC |
| | KLNGTTCVKLEDRQTSWKEEKNISFFILHEEPVLPNDNGSYRCSANFQSNLI |
| | ESHSTTLYVTDVKSASERPSKDEMAS |
| SEQ ID NO: 302 | DIQMTQSPSSLSASVGDRVTITCKASQDVGIAVAWYQQKPGKVPKLLIYWA |
| anti-SLAMF7 LC | STRHTGVPDRFSGSGSGTDFTLTISSLQPEDVATYYCQQYSSYPYTFGQGTK |
| fused to PD1 ECD | VEIKRTVAAPSVFIFPPSDEQLKSGTASVVCLLNNFYPREAKVQWKVDNAL |
| | QSGNSQESVTEQDSKDSTYSLSSTLTLSKADYEKHKVYACEVTHQGLSSPV |
| | TKSFNRGECGGGGSGGGGSGGGGSPGWFLDSPDRPWNPPTFSPALLVVTE |
| | GDNATFTCSFSNTSESFVLNWYRMSPSNQTDKLAAFPEDRSQPGQDCRFRV |
| | TQLPNGRDFHMSVVRARRNDSGTYLCGAISLAPKAQIKESLRAELRVTERR |
| | AEVPTAHPSPSPRPAGQFQTLV |
| SEQ ID NO: 303 | DIQMTQSPSSLSASVGDRVTITCKASQDVGIAVAWYQQKPGKVPKLLIYWA |
| anti-SLAMF7 LC | STRHTGVPDRFSGSGSGTDFTLTISSLQPEDVATYYCQQYSSYPYTFGQGTK |
| fused to | VEIKRTVAAPSVFIFPPSDEQLKSGTASVVCLLNNFYPREAKVQWKVDNAL |
| SIGLEC10 ECD | QSGNSQESVTEQDSKDSTYSLSSTLTLSKADYEKHKVYACEVTHQGLSSPV |
| | TKSFNRGECGGGGSGGGGSGGGGSMDGRFWIRVQESVMVPEGLCISVPCS |
| | FSYPRQDWTGSTPAYGYWFKAVTETTKGAPVATNHQSREVEMSTRGRFQL |
| | TGDPAKGNCSLVIRDAQMQDESQYFFRVERGSYVRYNFMNDGFFLKVTAL |
| | TQKPDVYIPETLEPGQPVTVICVFNWAFEECPPPSFSWTGAALSSQGTKPTT |
| | SHFSVLSFTPRPQDHNTDLTCHVDFSRKGVSAQRTVRLRVAYAPRDLVISIS |
| | RDNTPALEPQPQGNVPYLEAQKGQFLRLLCAADSQPPATLSWVLQNRVLS |
| | SSHPWGPRPLGLELPGVKAGDSGRYTCRAENRLGSQQRALDLSVQYPPEN |
| | LRVMVSQANRTVLENLGNGTSLPVLEGQSLCLVCVTHSSPPARLSWTQRG |
| | QVLSPSQPSDPGVLELPRVQVEHEGEFTCHARHPLGSQHVSLSLSVHYSPKL |
| | LGPSCSWEAEGLHCSCSSQASPAPSLRWWLGEELLEGNSSQDSFEVTPSSA |
| | GPWANSSLSLHGGLSSGLRLRCEAWNVHGAQSGSILQLPDKKGLIST |
| SEQ ID NO: 304 | DIQMTQSPSSLSASVGDRVTITCKASQDVGIAVAWYQQKPGKVPKLLIYWA |
| anti-SLAMF7 LC | STRHTGVPDRFSGSGSGTDFTLTISSLQPEDVATYYCQQYSSYPYTFGQGTK |
| fused to SIRPa | VEIKRTVAAPSVFIFPPSDEQLKSGTASVVCLLNNFYPREAKVQWKVDNAL |
| ECD | QSGNSQESVTEQDSKDSTYSLSSTLTLSKADYEKHKVYACEVTHQGLSSPV |
| | TKSFNRGECGGGGSGGGGSGGGGSEEELQVIQPDKSVLVAAGETATLRCT |
| | ATSLIPVGPIQWFRGAGPGRELIYNQKEGHFPRVTTVSDLTKRNNMDFSIRI |
| | GNITPADAGTYYCVKFRKGSPDDVEFKSGAGTELSVRAKPS |
| SEQ ID NO: 305 | DIQMTQSPSSLSASVGDRVTITCKASQDVGIAVAWYQQKPGKVPKLLIYWA |
| anti-SLAMF7 LC | STRHTGVPDRFSGSGSGTDFTLTISSLQPEDVATYYCQQYSSYPYTFGQGTK |
| fused to TIM3 | VEIKRTVAAPSVFIFPPSDEQLKSGTASVVCLLNNFYPREAKVQWKVDNAL |
| ECD | QSGNSQESVTEQDSKDSTYSLSSTLTLSKADYEKHKVYACEVTHQGLSSPV |
| | TKSFNRGECGGGGSGGGGSGGGGSSEVEYRAEVGQNAYLPCFYTPAAPGN |
| | LVPVCWGKGACPVFECGNVVLRTDERDVNYWTSRYWLNGDFRKGDVSL |
| | TIENVTLADSGIYCCRIQIPGIMNDEKFNLKLVIKPAKVTPAPTRQRDFTAAF |
| | PRMLTTRGHGPAETQTLGSLPDINLTQISTLANELRDSRLANDLRDSGATIRI |
| | G |
| SEQ ID NO: 306 | EVQLVESGGGLVQPGGSLRLSCAASGFDFSRYWMSWVRQAPGKGLEWIG |
| anti-SLAMF7 | EINPDSSTINYAPSLKDKFIISRDNAKNSLYLQMNSLRAEDTAVYYCARPDG |
| HC fused to PD1 | NYWYFDVWGQGTLVTVSSASTKGPSVFPLAPSSKSTSGGTAALGCLVKDY |
| ECD | FPEPVTVSWNSGALTSGVHTFPAVLQSSGLYSLSSVVTVPSSSLGTQTYICN |
| | VNHKPSNTKVDKKVEPKSCDKTHTCPPCPAPELLGGPSVFLFPPKPKDTLMI |
| | SRTPEVTCVVVDVSHEDPEVKFNWYVDGVEVHNAKTKPREEQYNSTYRV |
| | VSVLTVLHQDWLNGKEYKCKVSNKALPAPIEKTISKAKGQPREPQVYTLPP |
| | SRDELTKNQVSLTCLVKGFYPSDIAVEWESNGQPENNYKTTPPVLDSDGSF |
| | FLYSKLTVDKSRWQQGNVFSCSVMHEALHNHYTQKSLSLSPGKGGGGSG |
| | GGGSGGGGSPGWFLDSPDRPWNPPTFSPALLVVTEGDNATFTCSFSNTSESF |
| | VLNWYRMSPSNQTDKLAAFPEDRSQPGQDCRFRVTQLPNGRDFHMSVVR |
| | ARRNDSGTYLCGAISLAPKAQIKESLRAELRVTERRAEVPTAHPSPSPRPAG |
| | QFQTLV |
| SEQ ID NO: 307 | DIQMTQSPSSLSASVGDRVTITCKASQDVGIAVAWYQQKPGKVPKLLIYWA |
| anti-SLAMF7 LC | STRHTGVPDRFSGSGSGTDFTLTISSLQPEDVATYYCQQYSSYPYTFGQGTK |
| fused to BTLA | VEIKRTVAAPSVFIFPPSDEQLKSGTASVVCLLNNFYPREAKVQWKVDNAL |
| ECD | QSGNSQESVTEQDSKDSTYSLSSTLTLSKADYEKHKVYACEVTHQGLSSPV |
| | TKSFNRGECGGGGSGGGGSGGGGSKESCDVQLYIKRQSEHSILAGDPFELE |
| | CPVKYCANRPHVTWCKLNGTTCVKLEDRQTSWKEEKNISFFILHFEPVLPN |
| | DNGSYRCSANFQSNLIESHSTTLYVTDVKSASERPSKDEMAS |
| SEQ ID NO: 308 | EVQLVESGGGLVQPGGSLRLSCAASGFDFSRYWMSWVRQAPGKGLEWIG |
| anti-SLAMF7 | EINPDSSTINYAPSLKDKFIISRDNAKNSLYLQMNSLRAEDTAVYYCARPDG |
| HC fused to | NYWYFDVWGQGTLVTVSSASTKGPSVFPLAPSSKSTSGGTAALGCLVKDY |
| SIGLEC10 ECD | FPEPVTVSWNSGALTSGVHTFPAVLQSSGLYSLSSVVTVPSSSLGTQTYICN |
| | VNHKPSNTKVDKKVEPKSCDKTHTCPPCPAPELLGGPSVFLFPPKPKDTLMI |
| | SRTPEVTCVVVDVSHEDPEVKFNWYVDGVEVHNAKTKPREEQYNSTYRV |
| | VSVLTVLHQDWLNGKEYKCKVSNKALPAPIEKTISKAKGQPREPQVYTLPP |
| | SRDELTKNQVSLTCLVKGFYPSDIAVEWESNGQPENNYKTTPPVLDSDGSF |
| | FLYSKLTVDKSRWQQGNVFSCSVMHEALHNHYTQKSLSLSPGKGGGGSG |
| | GGGSGGGGSMDGRFWIRVQESVMVPEGLCISVPCSFSYPRQDWTGSTPAY |
| | GYWFKAVTETTKGAPVATNHQSREVEMSTRGRFQLTGDPAKGNCSLVIRD |
| | AQMQDESQYFFRVERGSYVRYNFMNDGFFLKVTALTQKPDVYIPETLEPG |
| | QPVTVICVFNWAFEECPPPSFSWTGAALSSQGTKPTTSHFSVLSFTPRPQDH |
| | NTDLTCHVDFSRKGVSAQRTVRLRVAYAPRDLVISISRDNTPALEPQPQGN |
| | VPYLEAQKGQFLRLLCAADSQPPATLSWVLQNRVLSSSHPWGPRPLGLELP |
| | GVKAGDSGRYTCRAENRLGSQQRALDLSVQYPPENLRVMVSQANRTVLE |
| | NLGNGTSLPVLEGQSLCLVCVTHSSPPARLSWTQRGQVLSPSQPSDPGVLE |
| | LPRVQVEHEGEFTCHARHPLGSQHVSLSLSVHYSPKLLGPSCSWEAEGLHC |
| | SCSSQASPAPSLRWWLGEELLEGNSSQDSFEVTPSSAGPWANSSLSLHGGLS |
| | SGLRLRCEAWNVHGAQSGSILQLPDKKGLIST |
| SEQ ID NO: 309 | EVQLVESGGGLVQPGGSLRLSCAASGFDFSRYWMSWVRQAPGKGLEWIG |
| anti-SLAMF7 | EINPDSSTINYAPSLKDKFIISRDNAKNSLYLQMNSLRAEDTAVYYCARPDG |
| HC fused to | NYWYFDVWGQGTLVTVSSASTKGPSVFPLAPSSKSTSGGTAALGCLVKDY |
| SIRPa EC | FPEPVTVSWNSGALTSGVHTFPAVLQSSGLYSLSSVVTVPSSSLGTQTYICN |
| | VNHKPSNTKVDKKVEPKSCDKTHTCPPCPAPELLGGPSVFLFPPKPKDTLMI |
| | SRTPEVTCVVVDVSHEDPEVKFNWYVDGVEVHNAKTKPREEQYNSTYRV |
| | VSVLTVLHQDWLNGKEYKCKVSNKALPAPIEKTISKAKGQPREPQVYTLPP |
| | SRDELTKNQVSLTCLVKGFYPSDIAVEWESNGQPENNYKTTPPVLDSDGSF |
| | FLYSKLTVDKSRWQQGNVFSCSVMHEALHNHYTQKSLSLSPGKGGGGSG |
| | GGGSGGGGSEEELQVIQPDKSVLVAAGETATLRCTATSLIPVGPIQWFRGA |
| | GPGRELIYNQKEGHFPRVTTVSDLTKRNNMDFSIRIGNITPADAGTYYCVKF |
| | RKGSPDDVEFKSGAGTELSVRAKPS |
| SEQ ID NO: 310 | EVQLVESGGGLVQPGGSLRLSCAASGFDFSRYWMSWVRQAPGKGLEWIG |
| anti-SLAMF7 | EINPDSSTINYAPSLKDKFIISRDNAKNSLYLQMNSLRAEDTAVYYCARPDG |
| HC fused to | NYWYFDVWGQGTLVTVSSASTKGPSVFPLAPSSKSTSGGTAALGCLVKDY |
| TGFbR EC | FPEPVTVSWNSGALTSGVHTFPAVLQSSGLYSLSSVVTVPSSSLGTQTYICN |
| | VNHKPSNTKVDKKVEPKSCDKTHTCPPCPAPELLGGPSVFLFPPKPKDTLMI |
| | SRTPEVTCVVVDVSHEDPEVKFNWYVDGVEVHNAKTKPREEQYNSTYRV |
| | VSVLTVLHQDWLNGKEYKCKVSNKALPAPIEKTISKAKGQPREPQVYTLPP |
| | SRDELTKNQVSLTCLVKGFYPSDIAVEWESNGQPENNYKTTPPVLDSDGSF |
| | FLYSKLTVDKSRWQQGNVFSCSVMHEALHNHYTQKSLSLSPGKGGGGSG |
| | GGGSGGGGSTIPPHVQKSVNNDMIVTDNNGAVKFPQLCKFCDVRFSTCDN |
| | QKSCMSNCSITSICEKPQEVCVAVWRKNDENITLETVCHDPKLPYHDFILED |
| | AASPKCIMKEKKKPGETFFMCSCSSDECNDNIIFSEEYNTSNPD |
| SEQ ID NO: 311 | EVQLVESGGGLVQPGGSLRLSCAASGFDFSRYWMSWVRQAPGKGLEWIG |
| anti-SLAMF7 | EINPDSSTINYAPSLKDKFIISRDNAKNSLYLQMNSLRAEDTAVYYCARPDG |
| HC fused to TIM3 | NYWYFDVWGQGTLVTVSSASTKGPSVFPLAPSSKSTSGGTAALGCLVKDY |
| ECD | FPEPVTVSWNSGALTSGVHTFPAVLQSSGLYSLSSVVTVPSSSLGTQTYICN |
| | VNHKPSNTKVDKKVEPKSCDKTHTCPPCPAPELLGGPSVFLFPPKPKDTLMI |
| | SRTPEVTCVVVDVSHEDPEVKFNWYVDGVEVHNAKTKPREEQYNSTYRV |
| | VSVLTVLHQDWLNGKEYKCKVSNKALPAPIEKTISKAKGQPREPQVYTLPP |
| | SRDELTKNQVSLTCLVKGFYPSDIAVEWESNGQPENNYKTTPPVLDSDGSF |
| | FLYSKLTVDKSRWQQGNVFSCSVMHEALHNHYTQKSLSLSPGKGGGGSG |
| | GGGSGGGGSSEVEYRAEVGQNAYLPCFYTPAAPGNLVPVCWGKGACPVF |
| | ECGNVVLRTDERDVNYWTSRYWLNGDFRKGDVSLTIENVTLADSGIYCCR |
| | IQIPGIMNDEKFNLKLVIKPAKVTPAPTRQRDFTAAFPRMLFERGHGPAETQ |
| | TLGSLPDINLTQISTLANELRDSRLANDLRDSGATIRIG |
| SEQ ID NO: 312 | EVQLVESGGGLVQPGGSLRLSCAASGFDFSRYWMSWVRQAPGKGLEWIG |
| anti-SLAMF7 | EINPDSSTINYAPSLKDKFIISRDNAKNSLYLQMNSLRAEDTAVYYCARPDG |
| HC fused to | NYWYFDVWGQGTLVTVSSASTKGPSVFPLAPSSKSTSGGTAALGCLVKDY |
| VEGFR ECD | FPEPVTVSWNSGALTSGVHTFPAVLQSSGLYSLSSVVTVPSSSLGTQTYICN |
| | VNHKPSNTKVDKKVEPKSCDKTHTCPPCPAPELLGGPSVFLFPPKPKDTLMI |
| | SRTPEVTCVVVDVSHEDPEVKFNWYVDGVEVHNAKTKPREEQYNSTYRV |
| | VSVLTVLHQDWLNGKEYKCKVSNKALPAPIEKTISKAKGQPREPQVYTLPP |
| | SRDELTKNQVSLTCLVKGFYPSDIAVEWESNGQPENNYKTTPPVLDSDGSF |
| | FLYSKLTVDKSRWQQGNVFSCSVMHEALHNHYTQKSLSLSPGKGGGGSG |
| | GGGSGGGGSSDTGRPFVEMYSEIPEIIHMTEGRELVIPCRVTSPNITVTLKKF |
| | PLDTLIPDGKRIIWDSRKGFIISNATYKEIGLLTCEATVNGHLYKTNYLTHRQ |
| | TNTIIDVVLSPSHGIELSVGEKLVLNCTARTELNVGIDFNWEYPSSKHQHKK |
| | LVNRDLKTQSGSEMKKFLSTLTIDGVTRSDQGLYTCAASSGLMTKKNSTFV |
| | RVHEK |
| SEQ ID NO: 313 | QVQLQESGPGLVRPSQTLSLTCTVSGYSITSDHAWSWVRQPPGRGLEWIGY |
| anti-IL6R HC | ISYSGITTYNPSLKSRVTMLRDTSKNQFSLRLSSVTAADTAVYYCARSLART |
| fused to BTLA | TAMDYWGQGSLVTVSSASTKGPSVFPLAPSSKSTSGGTAALGCLVKDYFPE |
| ECD | PVTVSWNSGALTSGVHTFPAVLQSSGLYSLSSVVTVPSSSLGTQTYICNVNH |
| | KPSNTKVDKKVEPKSCDKTHTCPPCPAPELLGGPSVFLFPPKPKDTLMISRT |
| | PEVTCVVVDVSHEDPEVKFNWYVDGVEVHNAKTKPREEQYNSTYRVVSV |
| | LTVLHQDWLNGKEYKCKVSNKALPAPIEKTISKAKGQPREPQVYTLPPSRD |
| | ELTKNQVSLTCLVKGFYPSDIAVEWESNGQPENNYKTTPPVLDSDGSFFLY |
| | SKLTVDKSRWQQGNVFSCSVMHEALHNHYTQKSLSLSPGKGGGGSGGGG |
| | SGGGGSKESCDVQLYIKRQSEHSILAGDPFELECPVKYCANRPHVTWCKLN |
| | GTTCVKLEDRQTSWKEEKNISFFILHFEPVLPNDNGSYRCSANFQSNLIESHS |
| | TTLYVTDVKSASERPSKDEMAS |
| SEQ ID NO: 314 | DIQMTQSPSSLSASVGDRVTITCRASQDISSYLNWYQQKPGKAPKLLIYYTS |
| anti-IL6R LC | RLHSGVPSRFSGSGSGTDFTFTISSLQPEDIATYYCQQGNTLPYTFGQGTKV |
| fused to PD1 ECD | EIKRTVAAPSVFIFPPSDEQLKSGTASVVCLLNNFYPREAKVQWKVDNALQ |
| | SGNSQESVTEQDSKDSTYSLSSTLTLSKADYEKHKVYACEVTHQGLSSPVT |
| | KSFNRGECGGGGSGGGGSGGGGSPGWFLDSPDRPWNPPTFSPALLVVTEG |
| | DNATFTCSFSNTSESFVLNWYRMSPSNQTDKLAAFPEDRSQPGQDCRFRVT |
| | QLPNGRDFHMSVVRARRNDSGTYLCGAISLAPKAQIKESLRAELRVTERRA |
| | EVPTAHPSPSPRPAGQFQTLV |
| SEQ ID NO: 315 | DIQMTQSPSSLSASVGDRVTITCRASQDISSYLNWYQQKPGKAPKLLIYYTS |
| anti-IL6R LC | RLHSGVPSRFSGSGSGTDFTFTISSLQPEDIATYYCQQGNTLPYTFGQGTKV |
| fused to | EIKRTVAAPSVFIFPPSDEQLKSGTASVVCLLNNFYPREAKVQWKVDNALQ |
| SIGLEC10 ECD | SGNSQESVTEQDSKDSTYSLSSTLTLSKADYEKHKVYACEVTHQGLSSPVT |
| | KSFNRGECGGGGSGGGGSGGGGSMDGRFWIRVQESVMVPEGLCISVPCSF |
| | SYPRQDWTGSTPAYGYWFKAVTETTKGAPVATNHQSREVEMSTRGRFQL |
| | TGDPAKGNCSLVIRDAQMQDESQYFFRVERGSYVRYNFMNDGFFLKVTAL |
| | TQKPDVYIPETLEPGQPVTVICVFNWAFEECPPPSFSWTGAALSSQGTKPTT |
| | SHFSVLSFTPRPQDHNTDLTCHVDFSRKGVSAQRTVRLRVAYAPRDLVISIS |
| | RDNTPALEPQPQGNVPYLEAQKGQFLRLLCAADSQPPATLSWVLQNRVLS |
| | SSHPWGPRPLGLELPGVKAGDSGRYTCRAENRLGSQQRALDLSVQYPPEN |
| | LRVMVSQANRTVLENLGNGTSLPVLEGQSLCLVCVTHSSPPARLSWTQRG |
| | QVLSPSQPSDPGVLELPRVQVEHEGEFTCHARHPLGSQHVSLSLSVHYSPKL |
| | LGPSCSWEAEGLHCSCSSQASPAPSLRWWLGEELLEGNSSQDSFEVTPSSA |
| | GPWANSSLSLHGGLSSGLRLRCEAWNVHGAQSGSILQLPDKKGLIST |
| SEQ ID NO: 316 | DIQMTQSPSSLSASVGDRVTITCRASQDISSYLNWYQQKPGKAPKLLIYYTS |
| anti-IL6R LC | RLHSGVPSRFSGSGSGTDFTFTISSLQPEDIATYYCQQGNTLPYTFGQGTKV |
| fused to SIRPa | EIKRTVAAPSVFIFPPSDEQLKSGTASVVCLLNNFYPREAKVQWKVDNALQ |
| ECD | SGNSQESVTEQDSKDSTYSLSSTLTLSKADYEKHKVYACEVTHQGLSSPVT |
| | KSFNRGECGGGGSGGGGSGGGGSEEELQVIQPDKSVLVAAGETATLRCTA |
| | TSLIPVGPIQWFRGAGPGRELIYNQKEGHFPRVTTVSDLTKRNNMDFSIRIG |
| | NITPADAGTYYCVKFRKGSPDDVEFKSGAGTELSVRAKPS |
| SEQ ID NO: 317 | DIQMTQSPSSLSASVGDRVTITCRASQDISSYLNWYQQKPGKAPKLLIYYTS |
| anti-IL6R LC | RLHSGVPSRFSGSGSGTDFTFTISSLQPEDIATYYCQQGNTLPYTFGQGTKV |
| fused to TIM3 | EIKRTVAAPSVFIFPPSDEQLKSGTASVVCLLNNFYPREAKVQWKVDNALQ |
| ECD | SGNSQESVTEQDSKDSTYSLSSTLTLSKADYEKHKVYACEVTHQGLSSPVT |
| | KSFNRGECGGGGSGGGGSGGGGSSEVEYRAEVGQNAYLPCFYTPAAPGNL |
| | VPVCWGKGACPVFECGNVVLRTDERDVNYWTSRYWLNGDFRKGDVSLTI |
| | ENVTLADSGIYCCRIQIPGIMNDEKFNLKLVIKPAKVTPAPTRQRDFTAAFP |
| | RMLTTRGHGPAETQTLGSLPDINLTQISTLANELRDSRLANDLRDSGATIRI |
| | G |
| SEQ ID NO: 318 | QVQLQESGPGLVRPSQTLSLTCTVSGYSITSDHAWSWVRQPPGRGLEWIGY |
| anti-IL6R HC | ISYSGITTYNPSLKSRVTMLRDTSKNQFSLRLSSVTAADTAVYYCARSLART |
| fused to PD1 ECD | TAMDYWGQGSLVTVSSASTKGPSVFPLAPSSKSTSGGTAALGCLVKDYFPE |
| | PVTVSWNSGALTSGVHTFPAVLQSSGLYSLSSVVTVPSSSLGTQTYICNVNH |
| | KPSNTKVDKKVEPKSCDKTHTCPPCPAPELLGGPSVFLFPPKPKDTLMISRT |
| | PEVTCVVVDVSHEDPEVKFNWYVDGVEVHNAKTKPREEQYNSTYRVVSV |
| | LTVLHQDWLNGKEYKCKVSNKALPAPIEKTISKAKGQPREPQVYTLPPSRD |
| | ELTKNQVSLTCLVKGFYPSDIAVEWESNGQPENNYKTTPPVLDSDGSFFLY |
| | SKLTVDKSRWQQGNVFSCSVMHEALHNHYTQKSLSLSPGKGGGGSGGGG |
| | SGGGGSPGWFLDSPDRPWNPPTFSPALLVVTEGDNATFTCSFSNTSESFVLN |
| | WYRMSPSNQTDKLAAFPEDRSQPGQDCRFRVTQLPNGRDFHMSVVRARR |
| | NDSGTYLCGAISLAPKAQIKESLRAELRVTERRAEVPTAHPSPSPRPAGQFQ |
| | TLV |
| SEQ ID NO: 319 | DIQMTQSPSSLSASVGDRVTITCRASQDISSYLNWYQQKPGKAPKLLIYYTS |
| anti-IL6R LC | RLHSGVPSRFSGSGSGTDFTFTISSLQPEDIATYYCQQGNTLPYTFGQGTKV |
| fused to BTLA | EIKRTVAAPSVFIFPPSDEQLKSGTASVVCLLNNFYPREAKVQWKVDNALQ |
| ECD | SGNSQESVTEQDSKDSTYSLSSTLTLSKADYEKHKVYACEVTHQGLSSPVT |
| | KSFNRGECGGGGSGGGGSGGGGSKESCDVQLYIKRQSEHSILAGDPFELEC |
| | PVKYCANRPHVTWCKLNGTTCVKLEDRQTSWKEEKNISFFILHFEPVLPND |
| | NGSYRCSANFQSNLIESHSTTLYVTDVKSASERPSKDEMAS |
| SEQ ID NO: 320 | QVQLQESGPGLVRPSQTLSLTCTVSGYSITSDHAWSWVRQPPGRGLEWIGY |
| anti-IL6R HC | ISYSGITTYNPSLKSRVTMLRDTSKNQFSLRLSSVTAADTAVYYCARSLART |
| fused to | TAMDYWGQGSLVTVSSASTKGPSVFPLAPSSKSTSGGTAALGCLVKDYFPE |
| SIGLEC10 ECD | PVTVSWNSGALTSGVHTFPAVLQSSGLYSLSSVVTVPSSSLGTQTYICNVNH |
| | KPSNTKVDKKVEPKSCDKTHTCPPCPAPELLGGPSVFLFPPKPKDTLMISRT |
| | PEVTCVVVDVSHEDPEVKFNWYVDGVEVHNAKTKPREEQYNSTYRVVSV |
| | LTVLHQDWLNGKEYKCKVSNKALPAPIEKTISKAKGQPREPQVYTLPPSRD |
| | ELTKNQVSLTCLVKGFYPSDIAVEWESNGQPENNYKTTPPVLDSDGSFFLY |
| | SKLTVDKSRWQQGNVFSCSVMHEALHNHYTQKSLSLSPGKGGGGSGGGG |
| | SGGGGSMDGRFWIRVQESVMVPEGLCISVPCSFSYPRQDWTGSTPAYGYW |
| | FKAVTETTKGAPVATNHQSREVEMSTRGRFQLTGDPAKGNCSLVIRDAQM |
| | QDESQYFFRVERGSYVRYNFMNDGFFLKVTALTQKPDVYIPETLEPGQPVT |
| | VICVFNWAFEECPPPSFSWTGAALSSQGTKPTTSHFSVLSFTPRPQDHNTDL |
| | TCHVDFSRKGVSAQRTVRLRVAYAPRDLVISISRDNTPALEPQPQGNVPYL |
| | EAQKGQFLRLLCAADSQPPATLSWVLQNRVLSSSHPWGPRPLGLELPGVK |
| | AGDSGRYTCRAENRLGSQQRALDLSVQYPPENLRVMVSQANRTVLENLG |
| | NGTSLPVLEGQSLCLVCVTHSSPPARLSWTQRGQVLSPSQPSDPGVLELPRV |
| | QVEHEGEFTCHARHPLGSQHVSLSLSVHYSPKLLGPSCSWEAEGLHCSCSS |
| | QASPAPSLRWWLGEELLEGNSSQDSFEVTPSSAGPWANSSLSLHGGLSSGL |
| | RLRCEAWNVHGAQSGSILQLPDKKGLIST |
| SEQ ID NO: 321 | QVQLQESGPGLVRPSQTLSLTCTVSGYSITSDHAWSWVRQPPGRGLEWIGY |
| anti-IL6R HC | ISYSGITTYNPSLKSRVTMLRDTSKNQFSLRLSSVTAADTAVYYCARSLART |
| fused to SIRPa | TAMDYWGQGSLVTVSSASTKGPSVFPLAPSSKSTSGGTAALGCLVKDYFPE |
| ECD | PVTVSWNSGALTSGVHTFPAVLQSSGLYSLSSVVTVPSSSLGTQTYICNVNH |
| | KPSNTKVDKKVEPKSCDKTHTCPPCPAPELLGGPSVFLFPPKPKDTLMISRT |
| | PEVTCVVVDVSHEDPEVKFNWYVDGVEVHNAKTKPREEQYNSTYRVVSV |
| | LTVLHQDWLNGKEYKCKVSNKALPAPIEKTISKAKGQPREPQVYTLPPSRD |
| | ELTKNQVSLTCLVKGFYPSDIAVEWESNGQPENNYKTTPPVLDSDGSFFLY |
| | SKLTVDKSRWQQGNVFSCSVMHEALHNHYTQKSLSLSPGKGGGGSGGGG |
| | SGGGGSEEELQVIQPDKSVLVAAGETATLRCTATSLIPVGPIQWFRGAGPGR |
| | ELIYNQKEGHFPRVTTVSDLTKRNNMDFSIRIGNITPADAGTYYCVKFRKGS |
| | PDDVEFKSGAGTELSVRAKPS |
| SEQ ID NO: 322 | QVQLQESGPGLVRPSQTLSLTCTVSGYSITSDHAWSWVRQPPGRGLEWIGY |
| anti-IL6R HC | ISYSGITTYNPSLKSRVTMLRDTSKNQFSLRLSSVTAADTAVYYCARSLART |
| fused to TGFbR | TAMDYWGQGSLVTVSSASTKGPSVFPLAPSSKSTSGGTAALGCLVKDYFPE |
| ECD | PVTVSWNSGALTSGVHTFPAVLQSSGLYSLSSVVTVPSSSLGTQTYICNVNH |
| | KPSNTKVDKKVEPKSCDKTHTCPPCPAPELLGGPSVFLFPPKPKDTLMISRT |
| | PEVTCVVVDVSHEDPEVKFNWYVDGVEVHNAKTKPREEQYNSTYRVVSV |
| | LTVLHQDWLNGKEYKCKVSNKALPAPIEKTISKAKGQPREPQVYTLPPSRD |
| | ELTKNQVSLTCLVKGFYPSDIAVEWESNGQPENNYKTTPPVLDSDGSFFLY |
| | SKLTVDKSRWQQGNVFSCSVMHEALHNHYTQKSLSLSPGKGGGGSGGGG |
| | SGGGGSTIPPHVQKSVNNDMIVTDNNGAVKFPQLCKFCDVRFSTCDNQKS |
| | CMSNCSITSICEKPQEVCVAVWRKNDENITLETVCHDPKLPYHDFILEDAAS |
| | PKCIMKEKKKPGETFFMCSCSSDECNDNIIFSEEYNTSNPD |
| SEQ ID NO: 323 | QVQLQESGPGLVRPSQTLSLTCTVSGYSITSDHAWSWVRQPPGRGLEWIGY |
| anti-IL6R HC | ISYSGITTYNPSLKSRVTMLRDTSKNQFSLRLSSVTAADTAVYYCARSLART |
| fused to TIM3 | TAMDYWGQGSLVTVSSASTKGPSVFPLAPSSKSTSGGTAALGCLVKDYFPE |
| ECD | PVTVSWNSGALTSGVHTFPAVLQSSGLYSLSSVVTVPSSSLGTQTYICNVNH |
| | KPSNTKVDKKVEPKSCDKTHTCPPCPAPELLGGPSVFLFPPKPKDTLMISRT |
| | PEVTCVVVDVSHEDPEVKFNWYVDGVEVHNAKTKPREEQYNSTYRVVSV |
| | LTVLHQDWLNGKEYKCKVSNKALPAPIEKTISKAKGQPREPQVYTLPPSRD |
| | ELTKNQVSLTCLVKGFYPSDIAVEWESNGQPENNYKTTPPVLDSDGSFFLY |
| | SKLTVDKSRWQQGNVFSCSVMHEALHNHYTQKSLSLSPGKGGGGSGGGG |
| | SGGGGSSEVEYRAEVGQNAYLPCFYTPAAPGNLVPVCWGKGACPVFECGN |
| | VVLRTDERDVNYWTSRYWLNGDFRKGDVSLTIENVTLADSGIYCCRIQIPG |
| | IMNDEKFNLKLVIKPAKVTPAPTRQRDFTAAFPRMLTTRGHGPAETQTLGS |
| | LPDINLTQISTLANELRDSRLANDLRDSGATIRIG |
| SEQ ID NO: 324 | QVQLQESGPGLVRPSQTLSLTCTVSGYSITSDHAWSWVRQPPGRGLEWIGY |
| anti-IL6R HC | ISYSGITTYNPSLKSRVTMLRDTSKNQFSLRLSSVTAADTAVYYCARSLART |
| fused to VEGFR | TAMDYWGQGSLVTVSSASTKGPSVFPLAPSSKSTSGGTAALGCLVKDYFPE |
| ECD | PVTVSWNSGALTSGVHTFPAVLQSSGLYSLSSVVTVPSSSLGTQTYICNVNH |
| | KPSNTKVDKKVEPKSCDKTHTCPPCPAPELLGGPSVFLFPPKPKDTLMISRT |
| | PEVTCVVVDVSHEDPEVKFNWYVDGVEVHNAKTKPREEQYNSTYRVVSV |
| | LTVLHQDWLNGKEYKCKVSNKALPAPIEKTISKAKGQPREPQVYTLPPSRD |
| | ELTKNQVSLTCLVKGFYPSDIAVEWESNGQPENNYKTTPPVLDSDGSFFLY |
| | SKLTVDKSRWQQGNVFSCSVMHEALHNHYTQKSLSLSPGKGGGGSGGGG |
| | SGGGGSSDTGRPFVEMYSEIPEIIHMTEGRELVIPCRVTSPNITVTLKKFPLDT |
| | LIPDGKRIIWDSRKGFIISNATYKEIGLLTCEATVNGHLYKTNYLTHRQTNTI |
| | IDVVLSPSHGIELSVGEKLVLNCTARTELNVGIDFNWEYPSSKHQHKKLVN |
| | RDLKTQSGSEMKKFLSTLTIDGVTRSDQGLYTCAASSGLMTKKNSTFVRVH |
| | EK |
| SEQ ID NO: 325 | QVQLVQSGAEVKKPGASVKVSCKASGYTFTRYGISWVRQAPGQGLEWMG |
| anti-IL17R HC | WISTYSGNTNYAQKLQGRVTMTTDTSTSTAYMELRSLRSDDTAVYYCARR |
| fused to BTLA | QLYFDYWGQGTLVTVSSASTKGPSVFPLAPCSRSTSESTAALGCLVKDYFP |
| ECD | EPVTVSWNSGALTSGVHTFPAVLQSSGLYSLSSVVTVPSSNFGTQTYTCNV |
| | DHKPSNTKVDKTVERKCCVECPPCPAPPVAGPSVFLFPPKPKDTLMISRTPE |
| | VTCVVVDVSHEDPEVQFNWYVDGVEVHNAKTKPREEQFNSTFRVVSVLT |
| | VVHQDWLNGKEYKCKVSNKGLPAPIEKTISKTKGQPREPQVYTLPPSREEM |
| | TKNQVSLTCLVKGFYPSDIAVEWESNGQPENNYKTTPPMLDSDGSFFLYSK |
| | LTVDKSRWQQGNVFSCSVMHEALHNHYTQKSLSLSPGKGGGGSGGGGSG |
| | GGGSKESCDVQLYIKRQSEHSILAGDPFELECPVKYCANRPHVTWCKLNGT |
| | TCVKLEDRQTSWKEEKNISFFILHFEPVLPNDNGSYRCSANFQSNLIESHSTT |
| | LYVTDVKSASERPSKDEMAS |
| SEQ ID NO: 326 | EIVMTQSPATLSVSPGERATLSCRASQSVSSNLAWFQQKPGQAPRPLIYDAS |
| anti-IL17R LC | TRATGVPARFSGSGSGTDFTLTISSLQSEDFAVYYCQQYDNWPLTFGGGTK |
| fused to PD1 ECD | VEIKRTVAAPSVFIFPPSDEQLKSGTASVVCLLNNFYPREAKVQWKVDNAL |
| | QSGNSQESVTEQDSKDSTYSLSSTLTLSKADYEKHKVYACEVTHQGLSSPV |
| | TKSFNRGECGGGGSGGGGSGGGGSPGWFLDSPDRPWNPPTFSPALLVVTE |
| | GDNATFTCSFSNTSESFVLNWYRMSPSNQTDKLAAFPEDRSQPGQDCRFRV |
| | TQLPNGRDFHMSVVRARRNDSGTYLCGAISLAPKAQIKESLRAELRVTERR |
| | AEVPTAHPSPSPRPAGQFQTLV |
| SEQ ID NO: 327 | EIVMTQSPATLSVSPGERATLSCRASQSVSSNLAWFQQKPGQAPRPLIYDAS |
| anti-IL17R LC | TRATGVPARFSGSGSGTDFTLTISSLQSEDFAVYYCQQYDNWPLTFGGGTK |
| fused to | VEIKRTVAAPSVFIFPPSDEQLKSGTASVVCLLNNFYPREAKVQWKVDNAL |
| SIGLEC10 ECD | QSGNSQESVTEQDSKDSTYSLSSTLTLSKADYEKHKVYACEVTHQGLSSPV |
| | TKSFNRGECGGGGSGGGGSGGGGSMDGRFWIRVQESVMVPEGLCISVPCS |
| | FSYPRQDWTGSTPAYGYWFKAVTETTKGAPVATNHQSREVEMSTRGRFQL |
| | TGDPAKGNCSLVIRDAQMQDESQYFFRVERGSYVRYNFMNDGFFLKVTAL |
| | TQKPDVYIPETLEPGQPVTVICVFNWAFEECPPPSFSWTGAALSSQGTKPTT |
| | SHFSVLSFTPRPQDHNTDLTCHVDFSRKGVSAQRTVRLRVAYAPRDLVISIS |
| | RDNTPALEPQPQGNVPYLEAQKGQFLRLLCAADSQPPATLSWVLQNRVLS |
| | SSHPWGPRPLGLELPGVKAGDSGRYTCRAENRLGSQQRALDLSVQYPPEN |
| | LRVMVSQANRTVLENLGNGTSLPVLEGQSLCLVCVTHSSPPARLSWTQRG |
| | QVLSPSQPSDPGVLELPRVQVEHEGEFTCHARHPLGSQHVSLSLSVHYSPKL |
| | LGPSCSWEAEGLHCSCSSQASPAPSLRWWLGEELLEGNSSQDSFEVTPSSA |
| | GPWANSSLSLHGGLSSGLRLRCEAWNVHGAQSGSILQLPDKKGLIST |
| SEQ ID NO: 328 | EIVMTQSPATLSVSPGERATLSCRASQSVSSNLAWFQQKPGQAPRPLIYDAS |
| anti-IL17R LC | TRATGVPARFSGSGSGTDFTLTISSLQSEDFAVYYCQQYDNWPLTFGGGTK |
| fused to SIRPa | VEIKRTVAAPSVFIFPPSDEQLKSGTASVVCLLNNFYPREAKVQWKVDNAL |
| ECD | QSGNSQESVTEQDSKDSTYSLSSTLTLSKADYEKHKVYACEVTHQGLSSPV |
| | TKSFNRGECGGGGSGGGGSGGGGSEEELQVIQPDKSVLVAAGETATLRCT |
| | ATSLIPVGPIQWFRGAGPGRELIYNQKEGHFPRVTTVSDLTKRNNMDFSIRI |
| | GNITPADAGTYYCVKFRKGSPDDVEFKSGAGTELSVRAKPS |
| SEQ ID NO: 329 | EIVMTQSPATLSVSPGERATLSCRASQSVSSNLAWFQQKPGQAPRPLIYDAS |
| anti-IL17R LC | TRATGVPARFSGSGSGTDFTLTISSLQSEDFAVYYCQQYDNWPLTFGGGTK |
| fused to TIM3 | VEIKRTVAAPSVFIFPPSDEQLKSGTASVVCLLNNFYPREAKVQWKVDNAL |
| ECD | QSGNSQESVTEQDSKDSTYSLSSTLTLSKADYEKHKVYACEVTHQGLSSPV |
| | TKSFNRGECGGGGSGGGGSGGGGSSEVEYRAEVGQNAYLPCFYTPAAPGN |
| | LVPVCWGKGACPVFECGNVVLRTDERDVNYWTSRYWLNGDFRKGDVSL |
| | TIENVTLADSGIYCCRIQIPGIMNDEKFNLKLVIKPAKVTPAPTRQRDFTAAF |
| | PRMLTTRGHGPAETQTLGSLPDINLTQISTLANELRDSRLANDLRDSGATIRI |
| | G |
| SEQ ID NO: 330 | QVQLVQSGAEVKKPGASVKVSCKASGYTFTRYGISWVRQAPGQGLEWMG |
| anti-IL17R HC | WISTYSGNTNYAQKLQGRVTMTTDTSTSTAYMELRSLRSDDTAVYYCARR |
| fused to PD1 ECD | QLYFDYWGQGTLVTVSSASTKGPSVFPLAPCSRSTSESTAALGCLVKDYFP |
| | EPVTVSWNSGALTSGVHTFPAVLQSSGLYSLSSVVTVPSSNFGTQTYTCNV |
| | DHKPSNTKVDKTVERKCCVECPPCPAPPVAGPSVFLFPPKPKDTLMISRTPE |
| | VTCVVVDVSHEDPEVQFNWYVDGVEVHNAKTKPREEQFNSTFRVVSVLT |
| | VVHQDWLNGKEYKCKVSNKGLPAPIEKTISKTKGQPREPQVYTLPPSREEM |
| | TKNQVSLTCLVKGFYPSDIAVEWESNGQPENNYKTTPPMLDSDGSFFLYSK |
| | LTVDKSRWQQGNVFSCSVMHEALHNHYTQKSLSLSPGKGGGGSGGGGSG |
| | GGGSPGWFLDSPDRPWNPPTFSPALLVVTEGDNATFTCSFSNTSESFVLNW |
| | YRMSPSNQTDKLAAFPEDRSQPGQDCRFRVTQLPNGRDFHMSVVRARRND |
| | SGTYLCGAISLAPKAQIKESLRAELRVTERRAEVPTAHPSPSPRPAGQFQTL |
| | V |
| SEQ ID NO: 331 | EIVMTQSPATLSVSPGERATLSCRASQSVSSNLAWFQQKPGQAPRPLIYDAS |
| anti-IL17R LC | TRATGVPARFSGSGSGTDFTLTISSLQSEDFAVYYCQQYDNWPLTFGGGTK |
| fused to BTLA | VEIKRTVAAPSVFIFPPSDEQLKSGTASVVCLLNNFYPREAKVQWKVDNAL |
| ECD | QSGNSQESVTEQDSKDSTYSLSSTLTLSKADYEKHKVYACEVTHQGLSSPV |
| | TKSFNRGECGGGGSGGGGSGGGGSKESCDVQLYIKRQSEHSILAGDPFELE |
| | CPVKYCANRPHVTWCKLNGTTCVKLEDRQTSWKEEKNISFFILHFEPVLPN |
| | DNGSYRCSANFQSNLIESHSTTLYVTDVKSASERPSKDEMAS |
| SEQ ID NO: 332 | QVQLVQSGAEVKKPGASVKVSCKASGYTFTRYGISWVRQAPGQGLEWMG |
| anti-IL17R HC | WISTYSGNTNYAQKLQGRVTMTTDTSTSTAYMELRSLRSDDTAVYYCARR |
| fused to | QLYFDYWGQGTLVTVSSASTKGPSVFPLAPCSRSTSESTAALGCLVKDYFP |
| SIGLEC10 ECD | EPVTVSWNSGALTSGVHIFPAVLQSSGLYSLSSVVTVPSSNFGTQTYTCNV |
| | DHKPSNTKVDKTVERKCCVECPPCPAPPVAGPSVFLFPPKPKDTLMISRTPE |
| | VTCVVVDVSHEDPEVQFNWYVDGVEVHNAKTKPREEQFNSTFRVVSVLT |
| | VVHQDWLNGKEYKCKVSNKGLPAPIEKTISKTKGQPREPQVYTLPPSREEM |
| | TKNQVSLTCLVKGFYPSDIAVEWESNGQPENNYKTTPPMLDSDGSFFLYSK |
| | LTVDKSRWQQGNVFSCSVMHEALHNHYTQKSLSLSPGKGGGGSGGGGSG |
| | GGGSMDGRFWIRVQESVMVPEGLCISVPCSFSYPRQDWTGSTPAYGYWFK |
| | AVTETTKGAPVATNHQSREVEMSTRGRFQLTGDPAKGNCSLVIRDAQMQD |
| | ESQYFFRVERGSYVRYNFMNDGFFLKVTALTQKPDVYIPETLEPGQPVTVI |
| | CVFNWAFEECPPPSFSWTGAALSSQGTKPTTSHFSVLSFTPRPQDHNTDLTC |
| | HVDFSRKGVSAQRTVRLRVAYAPRDLVISISRDNTPALEPQPQGNVPYLEA |
| | QKGQFLRLLCAADSQPPATLSWVLQNRVLSSSHPWGPRPLGLELPGVKAG |
| | DSGRYTCRAENRLGSQQRALDLSVQYPPENLRVMVSQANRTVLENLGNGT |
| | SLPVLEGQSLCLVCVTHSSPPARLSWTQRGQVLSPSQPSDPGVLELPRVQVE |
| | HEGEFTCHARHPLGSQHVSLSLSVHYSPKLLGPSCSWEAEGLHCSCSSQASP |
| | APSLRWWLGEELLEGNSSQDSFEVTPSSAGPWANSSLSLHGGLSSGLRLRC |
| | EAWNVHGAQSGSILQLPDKKGLIST |
| SEQ ID NO: 333 | QVQLVQSGAEVKKPGASVKVSCKASGYTFTRYGISWVRQAPGQGLEWMG |
| anti-IL17R HC | WISTYSGNTNYAQKLQGRVTMTTDTSTSTAYMELRSLRSDDTAVYYCARR |
| fused to SIRPa | QLYFDYWGQGTLVTVSSASTKGPSVFPLAPCSRSTSESTAALGCLVKDYFP |
| ECD | EPVTVSWNSGALTSGVHIFPAVLQSSGLYSLSSVVTVPSSNFGTQTYTCNV |
| | DHKPSNTKVDKTVERKCCVECPPCPAPPVAGPSVFLFPPKPKDTLMISRTPE |
| | VTCVVVDVSHEDPEVQFNWYVDGVEVHNAKTKPREEQFNSTFRVVSVLT |
| | VVHQDWLNGKEYKCKVSNKGLPAPIEKTISKTKGQPREPQVYTLPPSREEM |
| | TKNQVSLTCLVKGFYPSDIAVEWESNGQPENNYKTTPPMLDSDGSFFLYSK |
| | LTVDKSRWQQGNVFSCSVMHEALHNHYTQKSLSLSPGKGGGGSGGGGSG |
| | GGGSEEELQVIQPDKSVLVAAGETATLRCTATSLIPVGPIQWFRGAGPGREL |
| | IYNQKEGHFPRVTTVSDLTKRNNMDFSIRIGNITPADAGTYYCVKFRKGSPD |
| | DVEFKSGAGTELSVRAKPS |
| SEQ ID NO: 334 | QVQLVQSGAEVKKPGASVKVSCKASGYTFTRYGISWVRQAPGQGLEWMG |
| anti-IL17R HC | WISTYSGNTNYAQKLQGRVTMTTDTSTSTAYMELRSLRSDDTAVYYCARR |
| fused to TGFbR | QLYFDYWGQGTLVTVSSASTKGPSVFPLAPCSRSTSESTAALGCLVKDYFP |
| ECD | EPVTVSWNSGALTSGVHIFPAVLQSSGLYSLSSVVTVPSSNFGTQTYTCNV |
| | DHKPSNTKVDKTVERKCCVECPPCPAPPVAGPSVFLFPPKPKDTLMISRTPE |
| | VTCVVVDVSHEDPEVQFNWYVDGVEVHNAKTKPREEQFNSTFRVVSVLT |
| | VVHQDWLNGKEYKCKVSNKGLPAPIEKTISKTKGQPREPQVYTLPPSREEM |
| | TKNQVSLTCLVKGFYPSDIAVEWESNGQPENNYKTTPPMLDSDGSFFLYSK |
| | LTVDKSRWQQGNVFSCSVMHEALHNHYTQKSLSLSPGKGGGGSGGGGSG |
| | GGGSTIPPHVQKSVNNDMIVTDNNGAVKFPQLCKFCDVRFSTCDNQKSCM |
| | SNCSITSICEKPQEVCVAVWRKNDENITLETVCHDPKLPYHDFILEDAASPK |
| | CIMKEKKKPGETFFMCSCSSDECNDNIIFSEEYNTSNPD |
| SEQ ID NO: 335 | QVQLVQSGAEVKKPGASVKVSCKASGYTFTRYGISWVRQAPGQGLEWMG |
| anti-IL17R HC | WISTYSGNTNYAQKLQGRVTMTTDTSTSTAYMELRSLRSDDTAVYYCARR |
| fused to TIM3 | QLYFDYWGQGTLVTVSSASTKGPSVFPLAPCSRSTSESTAALGCLVKDYFP |
| ECD | EPVTVSWNSGALTSGVHIFPAVLQSSGLYSLSSVVTVPSSNFGTQTYTCNV |
| | DHKPSNTKVDKTVERKCCVECPPCPAPPVAGPSVFLFPPKPKDTLMISRTPE |
| | VTCVVVDVSHEDPEVQFNWYVDGVEVHNAKTKPREEQFNSTFRVVSVLT |
| | VVHQDWLNGKEYKCKVSNKGLPAPIEKTISKTKGQPREPQVYTLPPSREEM |
| | TKNQVSLTCLVKGFYPSDIAVEWESNGQPENNYKTTPPMLDSDGSFFLYSK |
| | LTVDKSRWQQGNVFSCSVMHEALHNHYTQKSLSLSPGKGGGGSGGGGSG |
| | GGGSSEVEYRAEVGQNAYLPCFYTPAAPGNLVPVCWGKGACPVFECGNV |
| | VLRTDERDVNYWTSRYWLNGDFRKGDVSLTIENVTLADSGIYCCRIQIPGI |
| | MNDEKFNLKLVIKPAKVTPAPTRQRDFTAAFPRMLTTRGHGPAETQTLGSL |
| | PDINLTQISTLANELRDSRLANDLRDSGATIRIG |
| SEQ ID NO: 336 | QVQLVQSGAEVKKPGASVKVSCKASGYTFTRYGISWVRQAPGQGLEWMG |
| anti-IL17R HC | WISTYSGNTNYAQKLQGRVTMTTDTSTSTAYMELRSLRSDDTAVYYCARR |
| fused to VEGFR | QLYFDYWGQGTLVTVSSASTKGPSVFPLAPCSRSTSESTAALGCLVKDYFP |
| ECD | EPVTVSWNSGALTSGVHTFPAVLQSSGLYSLSSVVTVPSSNFGTQTYTCNV |
| | DHKPSNTKVDKTVERKCCVECPPCPAPPVAGPSVFLFPPKPKDTLMISRTPE |
| | VTCVVVDVSHEDPEVQFNWYVDGVEVHNAKTKPREEQFNSTFRVVSVLT |
| | VVHQDWLNGKEYKCKVSNKGLPAPIEKTISKTKGQPREPQVYTLPPSREEM |
| | TKNQVSLTCLVKGFYPSDIAVEWESNGQPENNYKTTPPMLDSDGSFFLYSK |
| | LTVDKSRWQQGNVFSCSVMHEALHNHYTQKSLSLSPGKGGGGSGGGGSG |
| | GGGSSDTGRPFVEMYSEIPEIIHMTEGRELVIPCRVTSPNITVTLKKFPLDTLI |
| | PDGKRIIWDSRKGFIISNATYKEIGLLTCEATVNGHLYKTNYLTHRQTNTIID |
| | VVLSPSHGIELSVGEKLVLNCTARTELNVGIDFNWEYPSSKHQHKKLVNRD |
| | LKTQSGSEMKKFLSTLTIDGVTRSDQGLYTCAASSGLMTKKNSTFVRVHEK |
| SEQ ID NO: 337 | QVQLVQSGAEVKKPGSSVKVSCKASGYTFTDQTIHWMRQAPGQGLEWIG |
| anti-IL23 HC | YIYPRDDSPKYNENFKGKVTITADKSTSTAYMELSSLRSEDTAVYYCAIPDR |
| fused to BTLA | SGYAWFIYWGQGTLVTVSSASTKGPSVFPLAPSSKSTSGGTAALGCLVKDY |
| ECD | FPEPVTVSWNSGALTSGVHTFPAVLQSSGLYSLSSVVTVPSSSLGTQTYICN |
| | VNHKPSNTKVDKRVEPKSCDKTHTCPPCPAPEAAGGPSVFLFPPKPKDTLM |
| | ISRTPEVTCVVVDVSHEDPEVKFNWYVDGVEVHNAKTKPREEQYNSTYRV |
| | VSVLTVLHQDWLNGKEYKCKVSNKALPAPIEKTISKAKGQPREPQVYTLPP |
| | SREEMTKNQVSLTCLVKGFYPSDIAVEWESNGQPENNYKTTPPVLDSDGSF |
| | FLYSKLTVDKSRWQQGNVFSCSVMHEALHNHYTQKSLSLSPGGGGGSGG |
| | GGSGGGGSKESCDVQLYIKRQSEHSILAGDPFELECPVKYCANRPHVTWCK |
| | LNGTTCVKLEDRQTSWKEEKNISFFILHEEPVLPNDNGSYRCSANFQSNLIE |
| | SHSTTLYVTDVKSASERPSKDEMAS |
| SEQ ID NO: 338 | DIQMTQSPSSLSASVGDRVTITCKASRDVAIAVAWYQQKPGKVPKLLIYWA |
| anti-IL23 LC | STRHTGVPSRFSGSGSRTDFTLTISSLQPEDVADYFCHQYSSYPFTFGSGTKL |
| fused to PD1 ECD | EIKRTVAAPSVFIFPPSDEQLKSGTASVVCLLNNFYPREAKVQWKVDNALQ |
| | SGNSQESVTEQDSKDSTYSLSSTLTLSKADYEKHKVYACEVTHQGLSSPVT |
| | KSFNRGECGGGGSGGGGSGGGGSPGWFLDSPDRPWNPPTFSPALLVVTEG |
| | DNATFTCSFSNTSESFVLNWYRMSPSNQTDKLAAFPEDRSQPGQDCRFRVT |
| | QLPNGRDFHMSVVRARRNDSGTYLCGAISLAPKAQIKESLRAELRVTERRA |
| | EVPTAHPSPSPRPAGQFQTLV |
| SEQ ID NO: 339 | DIQMTQSPSSLSASVGDRVTITCKASRDVAIAVAWYQQKPGKVPKLLIYWA |
| anti-IL23 LC | STRHTGVPSRFSGSGSRTDFTLTISSLQPEDVADYFCHQYSSYPFTFGSGTKL |
| fused to | EIKRTVAAPSVFIFPPSDEQLKSGTASVVCLLNNFYPREAKVQWKVDNALQ |
| SIGLEC10 ECD | SGNSQESVTEQDSKDSTYSLSSTLTLSKADYEKHKVYACEVTHQGLSSPVT |
| | KSFNRGECGGGGSGGGGSGGGGSMDGRFWIRVQESVMVPEGLCISVPCSF |
| | SYPRQDWTGSTPAYGYWFKAVTETTKGAPVATNHQSREVEMSTRGRFQL |
| | TGDPAKGNCSLVIRDAQMQDESQYFFRVERGSYVRYNFMNDGFFLKVTAL |
| | TQKPDVYIPETLEPGQPVTVICVFNWAFEECPPPSFSWTGAALSSQGTKPTT |
| | SHFSVLSFTPRPQDHNTDLTCHVDFSRKGVSAQRTVRLRVAYAPRDLVISIS |
| | RDNTPALEPQPQGNVPYLEAQKGQFLRLLCAADSQPPATLSWVLQNRVLS |
| | SSHPWGPRPLGLELPGVKAGDSGRYTCRAENRLGSQQRALDLSVQYPPEN |
| | LRVMVSQANRTVLENLGNGTSLPVLEGQSLCLVCVTHSSPPARLSWTQRG |
| | QVLSPSQPSDPGVLELPRVQVEHEGEFTCHARHPLGSQHVSLSLSVHYSPKL |
| | LGPSCSWEAEGLHCSCSSQASPAPSLRWWLGEELLEGNSSQDSFEVTPSSA |
| | GPWANSSLSLHGGLSSGLRLRCEAWNVHGAQSGSILQLPDKKGLIST |
| SEQ ID NO: 340 | DIQMTQSPSSLSASVGDRVTITCKASRDVAIAVAWYQQKPGKVPKLLIYWA |
| anti-IL23 LC | STRHTGVPSRFSGSGSRTDFTLTISSLQPEDVADYFCHQYSSYPFTFGSGTKL |
| fused to SIRPa | EIKRTVAAPSVFIFPPSDEQLKSGTASVVCLLNNFYPREAKVQWKVDNALQ |
| ECD | SGNSQESVTEQDSKDSTYSLSSTLTLSKADYEKHKVYACEVTHQGLSSPVT |
| | KSFNRGECGGGGSGGGGSGGGGSEEELQVIQPDKSVLVAAGETATLRCTA |
| | TSLIPVGPIQWFRGAGPGRELIYNQKEGHFPRVTTVSDLTKRNNMDFSIRIG |
| | NITPADAGTYYCVKFRKGSPDDVEFKSGAGTELSVRAKPS |
| SEQ ID NO: 341 | DIQMTQSPSSLSASVGDRVTITCKASRDVAIAVAWYQQKPGKVPKLLIYWA |
| anti-IL23 LC | STRHTGVPSRFSGSGSRTDFTLTISSLQPEDVADYFCHQYSSYPFTFGSGTKL |
| fused to TIM3 | EIKRTVAAPSVFIFPPSDEQLKSGTASVVCLLNNFYPREAKVQWKVDNALQ |
| ECD | SGNSQESVTEQDSKDSTYSLSSTLTLSKADYEKHKVYACEVTHQGLSSPVT |
| | KSFNRGECGGGGSGGGGSGGGGSSEVEYRAEVGQNAYLPCFYTPAAPGNL |
| | VPVCWGKGACPVFECGNVVLRTDERDVNYWTSRYWLNGDFRKGDVSLTI |
| | ENVTLADSGIYCCRIQIPGIMNDEKFNLKLVIKPAKVTPAPTRQRDFTAAFP |
| | RMLTTRGHGPAETQTLGSLPDINLTQISTLANELRDSRLANDLRDSGATIRI |
| | G |
| SEQ ID NO: 342 | QVQLVQSGAEVKKPGSSVKVSCKASGYTFTDQTIHWMRQAPGQGLEWIG |
| anti-IL23 HC | YIYPRDDSPKYNENFKGKVTITADKSTSTAYMELSSLRSEDTAVYYCAIPDR |
| fused to PD1 ECD | SGYAWFIYWGQGTLVTVSSASTKGPSVFPLAPSSKSTSGGTAALGCLVKDY |
| | FPEPVTVSWNSGALTSGVHTFPAVLQSSGLYSLSSVVTVPSSSLGTQTYICN |
| | VNHKPSNTKVDKRVEPKSCDKTHTCPPCPAPEAAGGPSVFLFPPKPKDTLM |
| | ISRTPEVTCVVVDVSHEDPEVKFNWYVDGVEVHNAKTKPREEQYNSTYRV |
| | VSVLTVLHQDWLNGKEYKCKVSNKALPAPIEKTISKAKGQPREPQVYTLPP |
| | SREEMTKNQVSLTCLVKGFYPSDIAVEWESNGQPENNYKTTPPVLDSDGSF |
| | FLYSKLTVDKSRWQQGNVFSCSVMHEALHNHYTQKSLSLSPGGGGGSGG |
| | GGSGGGGSPGWFLDSPDRPWNPPTFSPALLVVTEGDNATFTCSFSNTSESFV |
| | LNWYRMSPSNQTDKLAAFPEDRSQPGQDCRFRVTQLPNGRDFHMSVVRA |
| | RRNDSGTYLCGAISLAPKAQIKESLRAELRVTERRAEVPTAHPSPSPRPAGQ |
| | FQTLV |
| SEQ ID NO: 343 | DIQMTQSPSSLSASVGDRVTITCKASRDVAIAVAWYQQKPGKVPKLLIYWA |
| anti-IL23 LC | STRHTGVPSRFSGSGSRTDFTLTISSLQPEDVADYFCHQYSSYPFTFGSGTKL |
| fused to BTLA | EIKRTVAAPSVFIFPPSDEQLKSGTASVVCLLNNFYPREAKVQWKVDNALQ |
| ECD | SGNSQESVTEQDSKDSTYSLSSTLTLSKADYEKHKVYACEVTHQGLSSPVT |
| | KSFNRGECGGGGSGGGGSGGGGSKESCDVQLYIKRQSEHSILAGDPFELEC |
| | PVKYCANRPHVTWCKLNGTTCVKLEDRQTSWKEEKNISFFILHFEPVLPND |
| | NGSYRCSANFQSNLIESHSTTLYVTDVKSASERPSKDEMAS |
| SEQ ID NO: 344 | QVQLVQSGAEVKKPGSSVKVSCKASGYTFTDQTIHWMRQAPGQGLEWIG |
| anti-IL23 HC | YIYPRDDSPKYNENFKGKVTITADKSTSTAYMELSSLRSEDTAVYYCAIPDR |
| fused to | SGYAWFIYWGQGTLVTVSSASTKGPSVFPLAPSSKSTSGGTAALGCLVKDY |
| SIGLEC10 ECD | FPEPVTVSWNSGALTSGVHTFPAVLQSSGLYSLSSVVTVPSSSLGTQTYICN |
| | VNHKPSNTKVDKRVEPKSCDKTHTCPPCPAPEAAGGPSVFLFPPKPKDTLM |
| | ISRTPEVTCVVVDVSHEDPEVKFNWYVDGVEVHNAKTKPREEQYNSTYRV |
| | VSVLTVLHQDWLNGKEYKCKVSNKALPAPIEKTISKAKGQPREPQVYTLPP |
| | SREEMTKNQVSLTCLVKGFYPSDIAVEWESNGQPENNYKTTPPVLDSDGSF |
| | FLYSKLTVDKSRWQQGNVFSCSVMHEALHNHYTQKSLSLSPGGGGGSGG |
| | GGSGGGGSMDGRFWIRVQESVMVPEGLCISVPCSFSYPRQDWTGSTPAYG |
| | YWFKAVTETTKGAPVATNHQSREVEMSTRGRFQLTGDPAKGNCSLVIRDA |
| | QMQDESQYFFRVERGSYVRYNFMNDGFFLKVTALTQKPDVYIPETLEPGQ |
| | PVTVICVFNWAFEECPPPSFSWTGAALSSQGTKPTTSHFSVLSFTPRPQDHN |
| | TDLTCHVDFSRKGVSAQRTVRLRVAYAPRDLVISISRDNTPALEPQPQGNV |
| | PYLEAQKGQFLRLLCAADSQPPATLSWVLQNRVLSSSHPWGPRPLGLELPG |
| | VKAGDSGRYTCRAENRLGSQQRALDLSVQYPPENLRVMVSQANRTVLEN |
| | LGNGTSLPVLEGQSLCLVCVTHSSPPARLSWTQRGQVLSPSQPSDPGVLELP |
| | RVQVEHEGEFTCHARHPLGSQHVSLSLSVHYSPKLLGPSCSWEAEGLHCSC |
| | SSQASPAPSLRWWLGEELLEGNSSQDSFEVTPSSAGPWANSSLSLHGGLSS |
| | GLRLRCEAWNVHGAQSGSILQLPDKKGLIST |
| SEQ ID NO: 345 | QVQLVQSGAEVKKPGSSVKVSCKASGYTFTDQTIHWMRQAPGQGLEWIG |
| anti-IL23 HC | YIYPRDDSPKYNENFKGKVTITADKSTSTAYMELSSLRSEDTAVYYCAIPDR |
| fused to SIRPa | SGYAWFIYWGQGTLVTVSSASTKGPSVFPLAPSSKSTSGGTAALGCLVKDY |
| ECD | FPEPVTVSWNSGALTSGVHTFPAVLQSSGLYSLSSVVTVPSSSLGTQTYICN |
| | VNHKPSNTKVDKRVEPKSCDKTHTCPPCPAPEAAGGPSVFLFPPKPKDTLM |
| | ISRTPEVTCVVVDVSHEDPEVKFNWYVDGVEVHNAKTKPREEQYNSTYRV |
| | VSVLTVLHQDWLNGKEYKCKVSNKALPAPIEKTISKAKGQPREPQVYTLPP |
| | SREEMTKNQVSLTCLVKGFYPSDIAVEWESNGQPENNYKTTPPVLDSDGSF |
| | FLYSKLTVDKSRWQQGNVFSCSVMHEALHNHYTQKSLSLSPGGGGGSGG |
| | GGSGGGGSEEELQVIQPDKSVLVAAGETATLRCTATSLIPVGPIQWFRGAGP |
| | GRELIYNQKEGHFPRVTTVSDLTKRNNMDFSIRIGNITPADAGTYYCVKFR |
| | KGSPDDVEFKSGAGTELSVRAKPS |
| SEQ ID NO: 346 | QVQLVQSGAEVKKPGSSVKVSCKASGYTFTDQTIHWMRQAPGQGLEWIG |
| anti-IL23 HC | YIYPRDDSPKYNENFKGKVTITADKSTSTAYMELSSLRSEDTAVYYCAIPDR |
| fused to TGFbR | SGYAWFIYWGQGTLVTVSSASTKGPSVFPLAPSSKSTSGGTAALGCLVKDY |
| ECD | FPEPVTVSWNSGALTSGVHTFPAVLQSSGLYSLSSVVTVPSSSLGTQTYICN |
| | VNHKPSNTKVDKRVEPKSCDKTHTCPPCPAPEAAGGPSVFLFPPKPKDTLM |
| | ISRTPEVTCVVVDVSHEDPEVKFNWYVDGVEVHNAKTKPREEQYNSTYRV |
| | VSVLTVLHQDWLNGKEYKCKVSNKALPAPIEKTISKAKGQPREPQVYTLPP |
| | SREEMTKNQVSLTCLVKGFYPSDIAVEWESNGQPENNYKTTPPVLDSDGSF |
| | FLYSKLTVDKSRWQQGNVFSCSVMHEALHNHYTQKSLSLSPGGGGGSGG |
| | GGSGGGGSTIPPHVQKSVNNDMIVTDNNGAVKFPQLCKFCDVRFSTCDNQ |
| | KSCMSNCSITSICEKPQEVCVAVWRKNDENITLETVCHDPKLPYHDFILEDA |
| | ASPKCIMKEKKKPGETFFMCSCSSDECNDNIIFSEEYNTSNPD |
| SEQ ID NO: 347 | QVQLVQSGAEVKKPGSSVKVSCKASGYTFTDQTIHWMRQAPGQGLEWIG |
| anti-IL23 HC | YIYPRDDSPKYNENFKGKVTITADKSTSTAYMELSSLRSEDTAVYYCAIPDR |
| fused to TIM3 | SGYAWFIYWGQGTLVTVSSASTKGPSVFPLAPSSKSTSGGTAALGCLVKDY |
| ECD | FPEPVTVSWNSGALTSGVHTFPAVLQSSGLYSLSSVVTVPSSSLGTQTYICN |
| | VNHKPSNTKVDKRVEPKSCDKTHTCPPCPAPEAAGGPSVFLFPPKPKDTLM |
| | ISRTPEVTCVVVDVSHEDPEVKFNWYVDGVEVHNAKTKPREEQYNSTYRV |
| | VSVLTVLHQDWLNGKEYKCKVSNKALPAPIEKTISKAKGQPREPQVYTLPP |
| | SREEMTKNQVSLTCLVKGFYPSDIAVEWESNGQPENNYKTTPPVLDSDGSF |
| | FLYSKLTVDKSRWQQGNVFSCSVMHEALHNHYTQKSLSLSPGGGGGSGG |
| | GGSGGGGSSEVEYRAEVGQNAYLPCFYTPAAPGNLVPVCWGKGACPVFEC |
| | GNVVLRTDERDVNYWTSRYWLNGDFRKGDVSLTIENVTLADSGIYCCRIQI |
| | PGIMNDEKFNLKLVIKPAKVTPAPTRQRDFTAAFPRMLTTRGHGPAETQTL |
| | GSLPDINLTQISTLANELRDSRLANDLRDSGATIRIG |
| SEQ ID NO: 348 | QVQLVQSGAEVKKPGSSVKVSCKASGYTFTDQTIHWMRQAPGQGLEWIG |
| anti-IL23 HC | YIYPRDDSPKYNENFKGKVTITADKSTSTAYMELSSLRSEDTAVYYCAIPDR |
| fused to VEGFR | SGYAWFIYWGQGTLVTVSSASTKGPSVFPLAPSSKSTSGGTAALGCLVKDY |
| ECD | FPEPVTVSWNSGALTSGVHTFPAVLQSSGLYSLSSVVTVPSSSLGTQTYICN |
| | VNHKPSNTKVDKRVEPKSCDKTHTCPPCPAPEAAGGPSVFLFPPKPKDTLM |
| | ISRTPEVTCVVVDVSHEDPEVKFNWYVDGVEVHNAKTKPREEQYNSTYRV |
| | VSVLTVLHQDWLNGKEYKCKVSNKALPAPIEKTISKAKGQPREPQVYTLPP |
| | SREEMTKNQVSLTCLVKGFYPSDIAVEWESNGQPENNYKTTPPVLDSDGSF |
| | FLYSKLTVDKSRWQQGNVFSCSVMHEALHNHYTQKSLSLSPGGGGGSGG |
| | GGSGGGGSSDTGRPFVEMYSEIPEIIHMTEGRELVIPCRVTSPNITVTLKKFP |
| | LDTLIPDGKRIIWDSRKGFIISNATYKEIGLLTCEATVNGHLYKTNYLTHRQT |
| | NTIIDVVLSPSHGIELSVGEKLVLNCTARTELNVGIDFNWEYPSSKHQHKKL |
| | VNRDLKTQSGSEMKKFLSTLTIDGVTRSDQGLYTCAASSGLMTKKNSTFVR |
| | VHEK |
| SEQ ID NO: 349 | QVQLVESGGGVVQPGRSLRLSCAASGFTFSVYGMNWVRQAPGKGLEWVA |
| anti-IL1b HC | IIWYDGDNQYYADSVKGRFTISRDNSKNTLYLQMNGLRAEDTAVYYCARD |
| fused to BTLA | LRTGPFDYWGQGTLVTVSSASTKGPSVFPLAPSSKSTSGGTAALGCLVKDY |
| ECD | FPEPVTVSWNSGALTSGVHTFPAVLQSSGLYSLSSVVTVPSSSLGTQTYICN |
| | VNHKPSNTKVDKRVEPKSCDKTHTCPPCPAPELLGGPSVFLFPPKPKDTLMI |
| | SRTPEVTCVVVDVSHEDPEVKFNWYVDGVEVHNAKTKPREEQYNSTYRV |
| | VSVLTVLHQDWLNGKEYKCKVSNKALPAPIEKTISKAKGQPREPQVYTLPP |
| | SREEMTKNQVSLTCLVKGFYPSDIAVEWESNGQPENNYKTTPPVLDSDGSF |
| | FLYSKLTVDKSRWQQGNVFSCSVMHEALHNHYTQKSLSLSPGKGGGGSG |
| | GGGSGGGGSKESCDVQLYIKRQSEHSILAGDPFELECPVKYCANRPHVTWC |
| | KLNGTTCVKLEDRQTSWKEEKNISFFILHEEPVLPNDNGSYRCSANFQSNLI |
| | ESHSTTLYVTDVKSASERPSKDEMAS |
| SEQ ID NO: 350 | EIVLTQSPDFQSVTPKEKVTITCRASQSIGSSLHWYQQKPDQSPKLLIKYASQ |
| anti-IL1b LC | SFSGVPSRFSGSGSGTDFTLTINSLEAEDAAAYYCHQSSSLPFTFGPGTKVDI |
| fused to PD1 ECD | KRTVAAPSVFIFPPSDEQLKSGTASVVCLLNNFYPREAKVQWKVDNALQSG |
| | NSQESVTEQDSKDSTYSLSSTLTLSKADYEKHKVYACEVTHQGLSSPVTKS |
| | FNRGECGGGGSGGGGSGGGGSPGWFLDSPDRPWNPPTFSPALLVVTEGDN |
| | ATFTCSFSNTSESFVLNWYRMSPSNQTDKLAAFPEDRSQPGQDCRFRVTQL |
| | PNGRDFHMSVVRARRNDSGTYLCGAISLAPKAQIKESLRAELRVTERRAEV |
| | PTAHPSPSPRPAGQFQTLV |
| SEQ ID NO: 351 | EIVLTQSPDFQSVTPKEKVTITCRASQSIGSSLHWYQQKPDQSPKLLIKYASQ |
| anti-IL1b LC | SFSGVPSRFSGSGSGTDFTLTINSLEAEDAAAYYCHQSSSLPFTFGPGTKVDI |
| fused to | KRTVAAPSVFIFPPSDEQLKSGTASVVCLLNNFYPREAKVQWKVDNALQSG |
| SIGLEC10 ECD | NSQESVTEQDSKDSTYSLSSTLTLSKADYEKHKVYACEVTHQGLSSPVTKS |
| | FNRGECGGGGSGGGGSGGGGSMDGRFWIRVQESVMVPEGLCISVPCSFSY |
| | PRQDWTGSTPAYGYWFKAVTETTKGAPVATNHQSREVEMSTRGRFQLTG |
| | DPAKGNCSLVIRDAQMQDESQYFFRVERGSYVRYNFMNDGFFLKVTALTQ |
| | KPDVYIPETLEPGQPVTVICVFNWAFEECPPPSFSWTGAALSSQGTKPTTSH |
| | FSVLSFTPRPQDHNTDLTCHVDFSRKGVSAQRTVRLRVAYAPRDLVISISRD |
| | NTPALEPQPQGNVPYLEAQKGQFLRLLCAADSQPPATLSWVLQNRVLSSSH |
| | PWGPRPLGLELPGVKAGDSGRYTCRAENRLGSQQRALDLSVQYPPENLRV |
| | MVSQANRTVLENLGNGTSLPVLEGQSLCLVCVTHSSPPARLSWTQRGQVL |
| | SPSQPSDPGVLELPRVQVEHEGEFTCHARHPLGSQHVSLSLSVHYSPKLLGP |
| | SCSWEAEGLHCSCSSQASPAPSLRWWLGEELLEGNSSQDSFEVTPSSAGPW |
| | ANSSLSLHGGLSSGLRLRCEAWNVHGAQSGSILQLPDKKGLIST |
| SEQ ID NO: 352 | EIVLTQSPDFQSVTPKEKVTITCRASQSIGSSLHWYQQKPDQSPKLLIKYASQ |
| anti-IL1b LC | SFSGVPSRFSGSGSGTDFTLTINSLEAEDAAAYYCHQSSSLPFTFGPGTKVDI |
| fused to SIRPa | KRTVAAPSVFIFPPSDEQLKSGTASVVCLLNNFYPREAKVQWKVDNALQSG |
| ECD | NSQESVTEQDSKDSTYSLSSTLTLSKADYEKHKVYACEVTHQGLSSPVTKS |
| | FNRGECGGGGSGGGGSGGGGSEEELQVIQPDKSVLVAAGETATLRCTATSL |
| | IPVGPIQWFRGAGPGRELIYNQKEGHFPRVTTVSDLTKRNNMDFSIRIGNITP |
| | ADAGTYYCVKFRKGSPDDVEFKSGAGTELSVRAKPS |
| SEQ ID NO: 353 | EIVLTQSPDFQSVTPKEKVTITCRASQSIGSSLHWYQQKPDQSPKLLIKYASQ |
| anti-IL1b LC | SFSGVPSRFSGSGSGTDFTLTINSLEAEDAAAYYCHQSSSLPFTFGPGTKVDI |
| fused to TIM3 | KRTVAAPSVFIFPPSDEQLKSGTASVVCLLNNFYPREAKVQWKVDNALQSG |
| ECD | NSQESVTEQDSKDSTYSLSSTLTLSKADYEKHKVYACEVTHQGLSSPVTKS |
| | FNRGECGGGGSGGGGSGGGGSSEVEYRAEVGQNAYLPCFYTPAAPGNLVP |
| | VCWGKGACPVFECGNVVLRTDERDVNYWTSRYWLNGDFRKGDVSLTIEN |
| | VTLADSGIYCCRIQIPGIVINDEKFNLKLVIKPAKVTPAPTRQRDFTAAFPRM |
| | LTTRGHGPAETQTLGSLPDINLTQISTLANELRDSRLANDLRDSGATIRIG |
| SEQ ID NO: 354 | QVQLVESGGGVVQPGRSLRLSCAASGFTFSVYGMNWVRQAPGKGLEWVA |
| anti-IL1b HC | IIWYDGDNQYYADSVKGRFTISRDNSKNTLYLQMNGLRAEDTAVYYCARD |
| fused to PD1 ECD | LRTGPFDYWGQGTLVTVSSASTKGPSVFPLAPSSKSTSGGTAALGCLVKDY |
| | FPEPVTVSWNSGALTSGVHTFPAVLQSSGLYSLSSVVTVPSSSLGTQTYICN |
| | VNHKPSNTKVDKRVEPKSCDKTHTCPPCPAPELLGGPSVFLFPPKPKDTLMI |
| | SRTPEVTCVVVDVSHEDPEVKFNWYVDGVEVHNAKTKPREEQYNSTYRV |
| | VSVLTVLHQDWLNGKEYKCKVSNKALPAPIEKTISKAKGQPREPQVYTLPP |
| | SREEMTKNQVSLTCLVKGFYPSDIAVEWESNGQPENNYKTTPPVLDSDGSF |
| | FLYSKLTVDKSRWQQGNVFSCSVMHEALHNHYTQKSLSLSPGKGGGGSG |
| | GGGSGGGGSPGWFLDSPDRPWNPPTFSPALLVVTEGDNATFTCSFSNTSESF |
| | VLNWYRMSPSNQTDKLAAFPEDRSQPGQDCRFRVTQLPNGRDFHMSVVR |
| | ARRNDSGTYLCGAISLAPKAQIKESLRAELRVTERRAEVPTAHPSPSPRPAG |
| | QFQTLV |
| SEQ ID NO: 355 | EIVLTQSPDFQSVTPKEKVTITCRASQSIGSSLHWYQQKPDQSPKLLIKYASQ |
| anti-IL1b LC | SFSGVPSRFSGSGSGTDFTLTINSLEAEDAAAYYCHQSSSLPFTFGPGTKVDI |
| fused to BTLA | KRTVAAPSVFIFPPSDEQLKSGTASVVCLLNNFYPREAKVQWKVDNALQSG |
| ECD | NSQESVTEQDSKDSTYSLSSTLTLSKADYEKHKVYACEVTHQGLSSPVTKS |
| | FNRGECGGGGSGGGGSGGGGSKESCDVQLYIKRQSEHSILAGDPFELECPV |
| | KYCANRPHVTWCKLNGTTCVKLEDRQTSWKEEKNISFFILHFEPVLPNDNG |
| | SYRCSANFQSNLIESHSTTLYVTDVKSASERPSKDEMAS |
| SEQ ID NO: 356 | QVQLVESGGGVVQPGRSLRLSCAASGFTFSVYGMNWVRQAPGKGLEWVA |
| anti-IL1b HC | IIWYDGDNQYYADSVKGRFTISRDNSKNTLYLQMNGLRAEDTAVYYCARD |
| fused to | LRTGPFDYWGQGTLVTVSSASTKGPSVFPLAPSSKSTSGGTAALGCLVKDY |
| SIGLEC10 ECD | FPEPVTVSWNSGALTSGVHTFPAVLQSSGLYSLSSVVTVPSSSLGTQTYICN |
| | VNHKPSNTKVDKRVEPKSCDKTHTCPPCPAPELLGGPSVFLFPPKPKDTLMI |
| | SRTPEVTCVVVDVSHEDPEVKFNWYVDGVEVHNAKTKPREEQYNSTYRV |
| | VSVLTVLHQDWLNGKEYKCKVSNKALPAPIEKTISKAKGQPREPQVYTLPP |
| | SREEMTKNQVSLTCLVKGFYPSDIAVEWESNGQPENNYKTTPPVLDSDGSF |
| | FLYSKLTVDKSRWQQGNVFSCSVMHEALHNHYTQKSLSLSPGKGGGGSG |
| | GGGSGGGGSMDGRFWIRVQESVMVPEGLCISVPCSFSYPRQDWTGSTPAY |
| | GYWFKAVTETTKGAPVATNHQSREVEMSTRGRFQLTGDPAKGNCSLVIRD |
| | AQMQDESQYFFRVERGSYVRYNFMNDGFFLKVTALTQKPDVYIPETLEPG |
| | QPVTVICVFNWAFEECPPPSFSWTGAALSSQGTKPTTSHFSVLSFTPRPQDH |
| | NTDLTCHVDFSRKGVSAQRTVRLRVAYAPRDLVISISRDNTPALEPQPQGN |
| | VPYLEAQKGQFLRLLCAADSQPPATLSWVLQNRVLSSSHPWGPRPLGLELP |
| | GVKAGDSGRYTCRAENRLGSQQRALDLSVQYPPENLRVMVSQANRTVLE |
| | NLGNGTSLPVLEGQSLCLVCVTHSSPPARLSWTQRGQVLSPSQPSDPGVLE |
| | LPRVQVEHEGEFTCHARHPLGSQHVSLSLSVHYSPKLLGPSCSWEAEGLHC |
| | SCSSQASPAPSLRWWLGEELLEGNSSQDSFEVTPSSAGPWANSSLSLHGGLS |
| | SGLRLRCEAWNVHGAQSGSILQLPDKKGLIST |
| SEQ ID NO: 357 | QVQLVESGGGVVQPGRSLRLSCAASGFTFSVYGMNWVRQAPGKGLEWVA |
| anti-IL1b HC | IIWYDGDNQYYADSVKGRFTISRDNSKNTLYLQMNGLRAEDTAVYYCARD |
| fused to SIRPa | LRTGPFDYWGQGTLVTVSSASTKGPSVFPLAPSSKSTSGGTAALGCLVKDY |
| ECD | FPEPVTVSWNSGALTSGVHTFPAVLQSSGLYSLSSVVTVPSSSLGTQTYICN |
| | VNHKPSNTKVDKRVEPKSCDKTHTCPPCPAPELLGGPSVFLFPPKPKDTLMI |
| | SRTPEVTCVVVDVSHEDPEVKFNWYVDGVEVHNAKTKPREEQYNSTYRV |
| | VSVLTVLHQDWLNGKEYKCKVSNKALPAPIEKTISKAKGQPREPQVYTLPP |
| | SREEMTKNQVSLTCLVKGFYPSDIAVEWESNGQPENNYKTTPPVLDSDGSF |
| | FLYSKLTVDKSRWQQGNVFSCSVMHEALHNHYTQKSLSLSPGKGGGGSG |
| | GGGSGGGGSEEELQVIQPDKSVLVAAGETATLRCTATSLIPVGPIQWFRGA |
| | GPGRELIYNQKEGHFPRVTTVSDLTKRNNMDFSIRIGNITPADAGTYYCVKF |
| | RKGSPDDVEFKSGAGTELSVRAKPS |
| SEQ ID NO: 358 | QVQLVESGGGVVQPGRSLRLSCAASGFTFSVYGMNWVRQAPGKGLEWVA |
| anti-IL1b HC | IIWYDGDNQYYADSVKGRFTISRDNSKNTLYLQMNGLRAEDTAVYYCARD |
| fused to TGFbR | LRTGPFDYWGQGTLVTVSSASTKGPSVFPLAPSSKSTSGGTAALGCLVKDY |
| ECD | FPEPVTVSWNSGALTSGVHTFPAVLQSSGLYSLSSVVTVPSSSLGTQTYICN |
| | VNHKPSNTKVDKRVEPKSCDKTHTCPPCPAPELLGGPSVFLFPPKPKDTLMI |
| | SRTPEVTCVVVDVSHEDPEVKFNWYVDGVEVHNAKTKPREEQYNSTYRV |
| | VSVLTVLHQDWLNGKEYKCKVSNKALPAPIEKTISKAKGQPREPQVYTLPP |
| | SREEMTKNQVSLTCLVKGFYPSDIAVEWESNGQPENNYKTTPPVLDSDGSF |
| | FLYSKLTVDKSRWQQGNVFSCSVMHEALHNHYTQKSLSLSPGKGGGGSG |
| | GGGSGGGGSTIPPHVQKSVNNDMIVTDNNGAVKFPQLCKFCDVRFSTCDN |
| | QKSCMSNCSITSICEKPQEVCVAVWRKNDENITLETVCHDPKLPYHDFILED |
| | AASPKCIMKEKKKPGETFFMCSCSSDECNDNIIFSEEYNTSNPD |
| SEQ ID NO: 359 | QVQLVESGGGVVQPGRSLRLSCAASGFTFSVYGMNWVRQAPGKGLEWVA |
| anti-IL1b HC | IIWYDGDNQYYADSVKGRFTISRDNSKNTLYLQMNGLRAEDTAVYYCARD |
| fused to TIM3 | LRTGPFDYWGQGTLVTVSSASTKGPSVFPLAPSSKSTSGGTAALGCLVKDY |
| ECD | FPEPVTVSWNSGALTSGVHTFPAVLQSSGLYSLSSVVTVPSSSLGTQTYICN |
| | VNHKPSNTKVDKRVEPKSCDKTHTCPPCPAPELLGGPSVFLFPPKPKDTLMI |
| | SRTPEVTCVVVDVSHEDPEVKFNWYVDGVEVHNAKTKPREEQYNSTYRV |
| | VSVLTVLHQDWLNGKEYKCKVSNKALPAPIEKTISKAKGQPREPQVYTLPP |
| | SREEMTKNQVSLTCLVKGFYPSDIAVEWESNGQPENNYKTTPPVLDSDGSF |
| | FLYSKLTVDKSRWQQGNVFSCSVMHEALHNHYTQKSLSLSPGKGGGGSG |
| | GGGSGGGGSSEVEYRAEVGQNAYLPCFYTPAAPGNLVPVCWGKGACPVF |
| | ECGNVVLRTDERDVNYWTSRYWLNGDFRKGDVSLTIENVTLADSGIYCCR |
| | IQIPGIMNDEKFNLKLVIKPAKVTPAPTRQRDFTAAFPRMLFERGHGPAETQ |
| | TLGSLPDINLTQISTLANELRDSRLANDLRDSGATIRIG |
| SEQ ID NO: 360 | QVQLVESGGGVVQPGRSLRLSCAASGFTFSVYGMNWVRQAPGKGLEWVA |
| anti-IL1b HC | IIWYDGDNQYYADSVKGRFTISRDNSKNTLYLQMNGLRAEDTAVYYCARD |
| fused to VEGFR | LRTGPFDYWGQGTLVTVSSASTKGPSVFPLAPSSKSTSGGTAALGCLVKDY |
| ECD | FPEPVTVSWNSGALTSGVHTFPAVLQSSGLYSLSSVVTVPSSSLGTQTYICN |
| | VNHKPSNTKVDKRVEPKSCDKTHTCPPCPAPELLGGPSVFLFPPKPKDTLMI |
| | SRTPEVTCVVVDVSHEDPEVKFNWYVDGVEVHNAKTKPREEQYNSTYRV |
| | VSVLTVLHQDWLNGKEYKCKVSNKALPAPIEKTISKAKGQPREPQVYTLPP |
| | SREEMTKNQVSLTCLVKGFYPSDIAVEWESNGQPENNYKTTPPVLDSDGSF |
| | FLYSKLTVDKSRWQQGNVFSCSVMHEALHNHYTQKSLSLSPGKGGGGSG |
| | GGGSGGGGSSDTGRPFVEMYSEIPEIIHMTEGRELVIPCRVTSPNITVTLKKF |
| | PLDTLIPDGKRIIWDSRKGFIISNATYKEIGLLTCEATVNGHLYKTNYLTHRQ |
| | TNTIIDVVLSPSHGIELSVGEKLVLNCTARTELNVGIDFNWEYPSSKHQHKK |
| | LVNRDLKTQSGSEMKKFLSTLTIDGVTRSDQGLYTCAASSGLMTKKNSTFV |
| | RVHEK |
| SEQ ID NO: 361 | EVQLVESGGGLVQPGGSLRLSCAASGYTFTNYGMNWVRQAPGKGLEWVG |
| anti-VEGF HC | WINTYTGEPTYAADFKRRFTFSLDTSKSTAYLQMNSLRAEDTAVYYCAKY |
| fused to BTLA | PHYYGSSHWYFDVWGQGTLVTVSSASTKGPSVFPLAPSSKSTSGGTAALG |
| ECD | CLVKDYFPEPVTVSWNSGALTSGVHTFPAVLQSSGLYSLSSVVTVPSSSLGT |
| | QTYICNVNHKPSNTKVDKKVEPKSCDKTHTCPPCPAPELLGGPSVFLFPPKP |
| | KDTLMISRTPEVTCVVVDVSHEDPEVKFNWYVDGVEVHNAKTKPREEQY |
| | NSTYRVVSVLTVLHQDWLNGKEYKCKVSNKALPAPIEKTISKAKGQPREP |
| | QVYTLPPSREEMTKNQVSLTCLVKGFYPSDIAVEWESNGQPENNYKTTPPV |
| | LDSDGSFFLYSKLTVDKSRWQQGNVFSCSVMHEALHNHYTQKSLSLSPGK |
| | GGGGSGGGGSGGGGSKESCDVQLYIKRQSEHSILAGDPFELECPVKYCANR |
| | PHVTWCKLNGTTCVKLEDRQTSWKEEKNISFFILHEEPVLPNDNGSYRCSA |
| | NFQSNLIESHSTTLYVTDVKSASERPSKDEMAS |
| SEQ ID NO: 362 | DIQMTQSPSSLSASVGDRVTITCSASQDISNYLNWYQQKPGKAPKVLIYFTS |
| anti-VEGF LC | SLHSGVPSRFSGSGSGTDFTLTISSLQPEDFATYYCQQYSTVPWTFGQGTKV |
| fused to PD1 ECD | EIKRTVAAPSVFIFPPSDEQLKSGTASVVCLLNNFYPREAKVQWKVDNALQ |
| | SGNSQESVTEQDSKDSTYSLSSTLTLSKADYEKHKVYACEVTHQGLSSPVT |
| | KSFNRGECGGGGSGGGGSGGGGSPGWFLDSPDRPWNPPTFSPALLVVTEG |
| | DNATFTCSFSNTSESFVLNWYRMSPSNQTDKLAAFPEDRSQPGQDCRFRVT |
| | QLPNGRDFHMSVVRARRNDSGTYLCGAISLAPKAQIKESLRAELRVTERRA |
| | EVPTAHPSPSPRPAGQFQTLV |
| SEQ ID NO: 363 | DIQMTQSPSSLSASVGDRVTITCSASQDISNYLNWYQQKPGKAPKVLIYFTS |
| anti-VEGF LC | SLHSGVPSRFSGSGSGTDFTLTISSLQPEDFATYYCQQYSTVPWTFGQGTKV |
| fused to | EIKRTVAAPSVFIFPPSDEQLKSGTASVVCLLNNFYPREAKVQWKVDNALQ |
| SIGLEC10 ECD | SGNSQESVTEQDSKDSTYSLSSTLTLSKADYEKHKVYACEVTHQGLSSPVT |
| | KSFNRGECGGGGSGGGGSGGGGSMDGRFWIRVQESVMVPEGLCISVPCSF |
| | SYPRQDWTGSTPAYGYWFKAVTETTKGAPVATNHQSREVEMSTRGRFQL |
| | TGDPAKGNCSLVIRDAQMQDESQYFFRVERGSYVRYNFMNDGFFLKVTAL |
| | TQKPDVYIPETLEPGQPVTVICVFNWAFEECPPPSFSWTGAALSSQGTKPTT |
| | SHFSVLSFTPRPQDHNTDLTCHVDFSRKGVSAQRTVRLRVAYAPRDLVISIS |
| | RDNTPALEPQPQGNVPYLEAQKGQFLRLLCAADSQPPATLSWVLQNRVLS |
| | SSHPWGPRPLGLELPGVKAGDSGRYTCRAENRLGSQQRALDLSVQYPPEN |
| | LRVMVSQANRTVLENLGNGTSLPVLEGQSLCLVCVTHSSPPARLSWTQRG |
| | QVLSPSQPSDPGVLELPRVQVEHEGEFTCHARHPLGSQHVSLSLSVHYSPKL |
| | LGPSCSWEAEGLHCSCSSQASPAPSLRWWLGEELLEGNSSQDSFEVTPSSA |
| | GPWANSSLSLHGGLSSGLRLRCEAWNVHGAQSGSILQLPDKKGLIST |
| SEQ ID NO: 364 | DIQMTQSPSSLSASVGDRVTITCSASQDISNYLNWYQQKPGKAPKVLIYFTS |
| anti-VEGF LC | SLHSGVPSRFSGSGSGTDFTLTISSLQPEDFATYYCQQYSTVPWTFGQGTKV |
| fused to SIRPa | EIKRTVAAPSVFIFPPSDEQLKSGTASVVCLLNNFYPREAKVQWKVDNALQ |
| ECD | SGNSQESVTEQDSKDSTYSLSSTLTLSKADYEKHKVYACEVTHQGLSSPVT |
| | KSFNRGECGGGGSGGGGSGGGGSEEELQVIQPDKSVLVAAGETATLRCTA |
| | TSLIPVGPIQWFRGAGPGRELIYNQKEGHFPRVTTVSDLTKRNNMDFSIRIG |
| | NITPADAGTYYCVKFRKGSPDDVEFKSGAGTELSVRAKPS |
| SEQ ID NO: 365 | DIQMTQSPSSLSASVGDRVTITCSASQDISNYLNWYQQKPGKAPKVLIYFTS |
| anti- VEGF LC | SLHSGVPSRFSGSGSGTDFTLTISSLQPEDFATYYCQQYSTVPWTFGQGTKV |
| fused to TIM3 | EIKRTVAAPSVFIFPPSDEQLKSGTASVVCLLNNFYPREAKVQWKVDNALQ |
| ECD | SGNSQESVTEQDSKDSTYSLSSTLTLSKADYEKHKVYACEVTHQGLSSPVT |
| | KSFNRGECGGGGSGGGGSGGGGSSEVEYRAEVGQNAYLPCFYTPAAPGNL |
| | VPVCWGKGACPVFECGNVVLRTDERDVNYWTSRYWLNGDFRKGDVSLTI |
| | ENVTLADSGIYCCRIQIPGIMNDEKFNLKLVIKPAKVTPAPTRQRDFTAAFP |
| | RMLTTRGHGPAETQTLGSLPDINLTQISTLANELRDSRLANDLRDSGATIRI |
| | G |
| SEQ ID NO: 366 | EVQLVESGGGLVQPGGSLRLSCAASGYTFTNYGMNWVRQAPGKGLEWVG |
| anti-VEGF HC | WINTYTGEPTYAADFKRRFTFSLDTSKSTAYLQMNSLRAEDTAVYYCAKY |
| fused to PD1 ECD | PHYYGSSHWYFDVWGQGTLVTVSSASTKGPSVFPLAPSSKSTSGGTAALG |
| | CLVKDYFPEPVTVSWNSGALTSGVHTFPAVLQSSGLYSLSSVVTVPSSSLGT |
| | QTYICNVNHKPSNTKVDKKVEPKSCDKTHTCPPCPAPELLGGPSVFLFPPKP |
| | KDTLMISRTPEVTCVVVDVSHEDPEVKFNWYVDGVEVHNAKTKPREEQY |
| | NSTYRVVSVLTVLHQDWLNGKEYKCKVSNKALPAPIEKTISKAKGQPREP |
| | QVYTLPPSREEMTKNQVSLTCLVKGFYPSDIAVEWESNGQPENNYKTTPPV |
| | LDSDGSFFLYSKLTVDKSRWQQGNVFSCSVMHEALHNHYTQKSLSLSPGK |
| | GGGGSGGGGSGGGGSPGWFLDSPDRPWNPPTFSPALLVVTEGDNATFTCSF |
| | SNTSESFVLNWYRMSPSNQTDKLAAFPEDRSQPGQDCRFRVTQLPNGRDF |
| | HMSVVRARRNDSGTYLCGAISLAPKAQIKESLRAELRVTERRAEVPTAHPS |
| | PSPRPAGQFQTLV |
| SEQ ID NO: 367 | DIQMTQSPSSLSASVGDRVTITCSASQDISNYLNWYQQKPGKAPKVLIYFTS |
| anti-VEGF LC | SLHSGVPSRFSGSGSGTDFTLTISSLQPEDFATYYCQQYSTVPWTFGQGTKV |
| fused to BTLA | EIKRTVAAPSVFIFPPSDEQLKSGTASVVCLLNNFYPREAKVQWKVDNALQ |
| ECD | SGNSQESVTEQDSKDSTYSLSSTLTLSKADYEKHKVYACEVTHQGLSSPVT |
| | KSFNRGECGGGGSGGGGSGGGGSKESCDVQLYIKRQSEHSILAGDPFELEC |
| | PVKYCANRPHVTWCKLNGTTCVKLEDRQTSWKEEKNISFFILHFEPVLPND |
| | NGSYRCSANFQSNLIESHSTTLYVTDVKSASERPSKDEMAS |
| SEQ ID NO: 368 | EVQLVESGGGLVQPGGSLRLSCAASGYTFTNYGMNWVRQAPGKGLEWVG |
| anti-VEGF HC | WINTYTGEPTYAADFKRRFTFSLDTSKSTAYLQMNSLRAEDTAVYYCAKY |
| fused to | PHYYGSSHWYFDVWGQGTLVTVSSASTKGPSVFPLAPSSKSTSGGTAALG |
| SIGLEC10 ECD | CLVKDYFPEPVTVSWNSGALTSGVHTFPAVLQSSGLYSLSSVVTVPSSSLGT |
| | QTYICNVNHKPSNTKVDKKVEPKSCDKTHTCPPCPAPELLGGPSVFLFPPKP |
| | KDTLMISRTPEVTCVVVDVSHEDPEVKFNWYVDGVEVHNAKTKPREEQY |
| | NSTYRVVSVLTVLHQDWLNGKEYKCKVSNKALPAPIEKTISKAKGQPREP |
| | QVYTLPPSREEMTKNQVSLTCLVKGFYPSDIAVEWESNGQPENNYKTTPPV |
| | LDSDGSFFLYSKLTVDKSRWQQGNVFSCSVMHEALHNHYTQKSLSLSPGK |
| | GGGGSGGGGSGGGGSMDGRFWIRVQESVMVPEGLCISVPCSFSYPRQDWT |
| | GSTPAYGYWFKAVTETTKGAPVATNHQSREVEMSTRGRFQLTGDPAKGN |
| | CSLVIRDAQMQDESQYFFRVERGSYVRYNFMNDGFFLKVTALTQKPDVYI |
| | PETLEPGQPVTVICVFNWAFEECPPPSFSWTGAALSSQGTKPTTSHFSVLSFT |
| | PRPQDHNTDLTCHVDFSRKGVSAQRTVRLRVAYAPRDLVISISRDNTPALE |
| | PQPQGNVPYLEAQKGQFLRLLCAADSQPPATLSWVLQNRVLSSSHPWGPR |
| | PLGLELPGVKAGDSGRYTCRAENRLGSQQRALDLSVQYPPENLRVMVSQA |
| | NRTVLENLGNGTSLPVLEGQSLCLVCVTHSSPPARLSWTQRGQVLSPSQPS |
| | DPGVLELPRVQVEHEGEFTCHARHPLGSQHVSLSLSVHYSPKLLGPSCSWE |
| | AEGLHCSCSSQASPAPSLRWWLGEELLEGNSSQDSFEVTPSSAGPWANSSL |
| | SLHGGLSSGLRLRCEAWNVHGAQSGSILQLPDKKGLIST |
| SEQ ID NO: 369 | EVQLVESGGGLVQPGGSLRLSCAASGYTFTNYGMNWVRQAPGKGLEWVG |
| anti-VEGF HC | WINTYTGEPTYAADFKRRFTFSLDTSKSTAYLQMNSLRAEDTAVYYCAKY |
| fused to SIRPa | PHYYGSSHWYFDVWGQGTLVTVSSASTKGPSVFPLAPSSKSTSGGTAALG |
| ECD | CLVKDYFPEPVTVSWNSGALTSGVHTFPAVLQSSGLYSLSSVVTVPSSSLGT |
| | QTYICNVNHKPSNTKVDKKVEPKSCDKTHTCPPCPAPELLGGPSVFLFPPKP |
| | KDTLMISRTPEVTCVVVDVSHEDPEVKFNWYVDGVEVHNAKTKPREEQY |
| | NSTYRVVSVLTVLHQDWLNGKEYKCKVSNKALPAPIEKTISKAKGQPREP |
| | QVYTLPPSREEMTKNQVSLTCLVKGFYPSDIAVEWESNGQPENNYKTTPPV |
| | LDSDGSFFLYSKLTVDKSRWQQGNVFSCSVMHEALHNHYTQKSLSLSPGK |
| | GGGGSGGGGSGGGGSEEELQVIQPDKSVLVAAGETATLRCTATSLIPVGPIQ |
| | WFRGAGPGRELIYNQKEGHFPRVTTVSDLTKRNNMDFSIRIGNITPADAGT |
| | YYCVKFRKGSPDDVEFKSGAGTELSVRAKPS |
| SEQ ID NO: 370 | EVQLVESGGGLVQPGGSLRLSCAASGYTFTNYGMNWVRQAPGKGLEWVG |
| anti-VEGF HC | WINTYTGEPTYAADFKRRFTFSLDTSKSTAYLQMNSLRAEDTAVYYCAKY |
| fused to TGFbR | PHYYGSSHWYFDVWGQGTLVTVSSASTKGPSVFPLAPSSKSTSGGTAALG |
| ECD | CLVKDYFPEPVTVSWNSGALTSGVHTFPAVLQSSGLYSLSSVVTVPSSSLGT |
| | QTYICNVNHKPSNTKVDKKVEPKSCDKTHTCPPCPAPELLGGPSVFLFPPKP |
| | KDTLMISRTPEVTCVVVDVSHEDPEVKFNWYVDGVEVHNAKTKPREEQY |
| | NSTYRVVSVLTVLHQDWLNGKEYKCKVSNKALPAPIEKTISKAKGQPREP |
| | QVYTLPPSREEMTKNQVSLTCLVKGFYPSDIAVEWESNGQPENNYKTTPPV |
| | LDSDGSFFLYSKLTVDKSRWQQGNVFSCSVMHEALHNHYTQKSLSLSPGK |
| | GGGGSGGGGSGGGGSTIPPHVQKSVNNDMIVTDNNGAVKFPQLCKFCDVR |
| | FSTCDNQKSCMSNCSITSICEKPQEVCVAVWRKNDENITLETVCHDPKLPY |
| | HDFILEDAASPKCIMKEKKKPGETFFMCSCSSDECNDNIIFSEEYNTSNPD |
| SEQ ID NO: 371 | EVQLVESGGGLVQPGGSLRLSCAASGYTFTNYGMNWVRQAPGKGLEWVG |
| anti-VEGF HC | WINTYTGEPTYAADFKRRFTFSLDTSKSTAYLQMNSLRAEDTAVYYCAKY |
| fused to TIM3 | PHYYGSSHWYFDVWGQGTLVTVSSASTKGPSVFPLAPSSKSTSGGTAALG |
| ECD | CLVKDYFPEPVTVSWNSGALTSGVHTFPAVLQSSGLYSLSSVVTVPSSSLGT |
| | QTYICNVNHKPSNTKVDKKVEPKSCDKTHTCPPCPAPELLGGPSVFLFPPKP |
| | KDTLMISRTPEVTCVVVDVSHEDPEVKFNWYVDGVEVHNAKTKPREEQY |
| | NSTYRVVSVLTVLHQDWLNGKEYKCKVSNKALPAPIEKTISKAKGQPREP |
| | QVYTLPPSREEMTKNQVSLTCLVKGFYPSDIAVEWESNGQPENNYKTTPPV |
| | LDSDGSFFLYSKLTVDKSRWQQGNVFSCSVMHEALHNHYTQKSLSLSPGK |
| | GGGGSGGGGSGGGGSSEVEYRAEVGQNAYLPCFYTPAAPGNLVPVCWGK |
| | GACPVFECGNVVLRTDERDVNYWTSRYWLNGDFRKGDVSLTIENVTLADS |
| | GIYCCRIQIPGIMNDEKFNLKLVIKPAKVTPAPTRQRDFTAAFPRMLTTRGH |
| | GPAETQTLGSLPDINLTQISTLANELRDSRLANDLRDSGATIRIG |
| SEQ ID NO: 372 | EVQLVQSGGGLVKPGGSLRLSCAASGFTFSSYSMNWVRQAPGKGLEWVSS |
| anti-VEGFR HC | ISSSSSYIYYADSVKGRFTISRDNAKNSLYLQMNSLRAEDTAVYYCARVTD |
| fused to BTLA | AFDIWGQGTMVTVSSASTKGPSVFPLAPSSKSTSGGTAALGCLVKDYFPEP |
| ECD | VTVSWNSGALTSGVHTFPAVLQSSGLYSLSSVVTVPSSSLGTQTYICNVNH |
| | KPSNTKVDKKVEPKSCDKTHTCPPCPAPELLGGPSVFLFPPKPKDTLMISRT |
| | PEVTCVVVDVSHEDPEVKFNWYVDGVEVHNAKTKPREEQYNSTYRVVSV |
| | LTVLHQDWLNGKEYKCKVSNKALPAPIEKTISKAKGQPREPQVYTLPPSRE |
| | EMTKNQVSLTCLVKGFYPSDIAVEWESNGQPENNYKTTPPVLDSDGSFFLY |
| | SKLTVDKSRWQQGNVFSCSVMHEALHNHYTQKSLSLSPGKGGGGSGGGG |
| | SGGGGSKESCDVQLYIKRQSEHSILAGDPFELECPVKYCANRPHVTWCKLN |
| | GTTCVKLEDRQTSWKEEKNISFFILHFEPVLPNDNGSYRCSANFQSNLIESHS |
| | TTLYVTDVKSASERPSKDEMAS |
| SEQ ID NO: 373 | DIQMTQSPSSVSASIGDRVTITCRASQGIDNWLGWYQQKPGKAPKLLIYDA |
| anti-VEGFR LC | SNLDTGVPSRFSGSGSGTYFTLTISSLQAEDFAVYFCQQAKAFPPTFGGGTK |
| fused to PD1 ECD | VDIKGTVAAPSVFIFPPSDEQLKSGTASVVCLLNNFYPREAKVQWKVDNAL |
| | QSGNSQESVTEQDSKDSTYSLSSTLTLSKADYEKHKVYACEVTHQGLSSPV |
| | TKSFNRGECGGGGSGGGGSGGGGSPGWFLDSPDRPWNPPTFSPALLVVTE |
| | GDNATFTCSFSNTSESFVLNWYRMSPSNQTDKLAAFPEDRSQPGQDCRFRV |
| | TQLPNGRDFHMSVVRARRNDSGTYLCGAISLAPKAQIKESLRAELRVTERR |
| | AEVPTAHPSPSPRPAGQFQTLV |
| SEQ ID NO: 374 | DIQMTQSPSSVSASIGDRVTITCRASQGIDNWLGWYQQKPGKAPKLLIYDA |
| anti-VEGFR LC | SNLDTGVPSRFSGSGSGTYFTLTISSLQAEDFAVYFCQQAKAFPPTFGGGTK |
| fused to | VDIKGTVAAPSVFIFPPSDEQLKSGTASVVCLLNNFYPREAKVQWKVDNAL |
| SIGLEC10 ECD | QSGNSQESVTEQDSKDSTYSLSSTLTLSKADYEKHKVYACEVTHQGLSSPV |
| | TKSFNRGECGGGGSGGGGSGGGGSMDGRFWIRVQESVMVPEGLCISVPCS |
| | FSYPRQDWTGSTPAYGYWFKAVTETTKGAPVATNHQSREVEMSTRGRFQL |
| | TGDPAKGNCSLVIRDAQMQDESQYFFRVERGSYVRYNFMNDGFFLKVTAL |
| | TQKPDVYIPETLEPGQPVTVICVFNWAFEECPPPSFSWTGAALSSQGTKPTT |
| | SHFSVLSFTPRPQDHNTDLTCHVDFSRKGVSAQRTVRLRVAYAPRDLVISIS |
| | RDNTPALEPQPQGNVPYLEAQKGQFLRLLCAADSQPPATLSWVLQNRVLS |
| | SSHPWGPRPLGLELPGVKAGDSGRYTCRAENRLGSQQRALDLSVQYPPEN |
| | LRVMVSQANRTVLENLGNGTSLPVLEGQSLCLVCVTHSSPPARLSWTQRG |
| | QVLSPSQPSDPGVLELPRVQVEHEGEFTCHARHPLGSQHVSLSLSVHYSPKL |
| | LGPSCSWEAEGLHCSCSSQASPAPSLRWWLGEELLEGNSSQDSFEVTPSSA |
| | GPWANSSLSLHGGLSSGLRLRCEAWNVHGAQSGSILQLPDKKGLIST |
| SEQ ID NO: 375 | DIQMTQSPSSVSASIGDRVTITCRASQGIDNWLGWYQQKPGKAPKLLIYDA |
| anti-VEGFR LC | SNLDTGVPSRFSGSGSGTYFTLTISSLQAEDFAVYFCQQAKAFPPTFGGGTK |
| fused to SIRPa | VDIKGTVAAPSVFIFPPSDEQLKSGTASVVCLLNNFYPREAKVQWKVDNAL |
| ECD | QSGNSQESVTEQDSKDSTYSLSSTLTLSKADYEKHKVYACEVTHQGLSSPV |
| | TKSFNRGECGGGGSGGGGSGGGGSEEELQVIQPDKSVLVAAGETATLRCT |
| | ATSLIPVGPIQWFRGAGPGRELIYNQKEGHFPRVTTVSDLTKRNNMDFSIRI |
| | GNITPADAGTYYCVKFRKGSPDDVEFKSGAGTELSVRAKPS |
| SEQ ID NO: 376 | DIQMTQSPSSVSASIGDRVTITCRASQGIDNWLGWYQQKPGKAPKLLIYDA |
| anti-VEGFR LC | SNLDTGVPSRFSGSGSGTYFTLTISSLQAEDFAVYFCQQAKAFPPTFGGGTK |
| fused to TIM3 | VDIKGTVAAPSVFIFPPSDEQLKSGTASVVCLLNNFYPREAKVQWKVDNAL |
| ECD | QSGNSQESVTEQDSKDSTYSLSSTLTLSKADYEKHKVYACEVTHQGLSSPV |
| | TKSFNRGECGGGGSGGGGSGGGGSSEVEYRAEVGQNAYLPCFYTPAAPGN |
| | LVPVCWGKGACPVFECGNVVLRTDERDVNYWTSRYWLNGDFRKGDVSL |
| | TIENVTLADSGIYCCRIQIPGIMNDEKFNLKLVIKPAKVTPAPTRQRDFTAAF |
| | PRMLTTRGHGPAETQTLGSLPDINLTQISTLANELRDSRLANDLRDSGATIRI |
| | G |
| SEQ ID NO: 377 | EVQLVQSGGGLVKPGGSLRLSCAASGFTFSSYSMNWVRQAPGKGLEWVSS |
| anti-VEGFR HC | ISSSSSYIYYADSVKGRFTISRDNAKNSLYLQMNSLRAEDTAVYYCARVTD |
| fused to PD1 ECD | AFDIWGQGTMVTVSSASTKGPSVFPLAPSSKSTSGGTAALGCLVKDYFPEP |
| | VTVSWNSGALTSGVHTFPAVLQSSGLYSLSSVVTVPSSSLGTQTYICNVNH |
| | KPSNTKVDKKVEPKSCDKTHTCPPCPAPELLGGPSVFLFPPKPKDTLMISRT |
| | PEVTCVVVDVSHEDPEVKFNWYVDGVEVHNAKTKPREEQYNSTYRVVSV |
| | LTVLHQDWLNGKEYKCKVSNKALPAPIEKTISKAKGQPREPQVYTLPPSRE |
| | EMTKNQVSLTCLVKGFYPSDIAVEWESNGQPENNYKTTPPVLDSDGSFFLY |
| | SKLTVDKSRWQQGNVFSCSVMHEALHNHYTQKSLSLSPGKGGGGSGGGG |
| | SGGGGSPGWFLDSPDRPWNPPTFSPALLVVTEGDNATFTCSFSNTSESFVLN |
| | WYRMSPSNQTDKLAAFPEDRSQPGQDCRFRVTQLPNGRDFHMSVVRARR |
| | NDSGTYLCGAISLAPKAQIKESLRAELRVTERRAEVPTAHPSPSPRPAGQFQ |
| | TLV |
| SEQ ID NO: 378 | DIQMTQSPSSVSASIGDRVTITCRASQGIDNWLGWYQQKPGKAPKLLIYDA |
| anti-VEGFR LC | SNLDTGVPSRFSGSGSGTYFTLTISSLQAEDFAVYFCQQAKAFPPTFGGGTK |
| fused to BTLA | VDIKGTVAAPSVFIFPPSDEQLKSGTASVVCLLNNFYPREAKVQWKVDNAL |
| ECD | QSGNSQESVTEQDSKDSTYSLSSTLTLSKADYEKHKVYACEVTHQGLSSPV |
| | TKSFNRGECGGGGSGGGGSGGGGSKESCDVQLYIKRQSEHSILAGDPFELE |
| | CPVKYCANRPHVTWCKLNGTTCVKLEDRQTSWKEEKNISFFILHFEPVLPN |
| | DNGSYRCSANFQSNLIESHSTTLYVTDVKSASERPSKDEMAS |
| SEQ ID NO: 379 | EVQLVQSGGGLVKPGGSLRLSCAASGFTFSSYSMNWVRQAPGKGLEWVSS |
| anti-VEGFR HC | ISSSSSYIYYADSVKGRFTISRDNAKNSLYLQMNSLRAEDTAVYYCARVTD |
| fused to | AFDIWGQGTMVTVSSASTKGPSVFPLAPSSKSTSGGTAALGCLVKDYFPEP |
| SIGLEC10 ECD | VTVSWNSGALTSGVHTFPAVLQSSGLYSLSSVVTVPSSSLGTQTYICNVNH |
| | KPSNTKVDKKVEPKSCDKTHTCPPCPAPELLGGPSVFLFPPKPKDTLMISRT |
| | PEVTCVVVDVSHEDPEVKFNWYVDGVEVHNAKTKPREEQYNSTYRVVSV |
| | LTVLHQDWLNGKEYKCKVSNKALPAPIEKTISKAKGQPREPQVYTLPPSRE |
| | EMTKNQVSLTCLVKGFYPSDIAVEWESNGQPENNYKTTPPVLDSDGSFFLY |
| | SKLTVDKSRWQQGNVFSCSVMHEALHNHYTQKSLSLSPGKGGGGSGGGG |
| | SGGGGSMDGRFWIRVQESVMVPEGLCISVPCSFSYPRQDWTGSTPAYGYW |
| | FKAVTETTKGAPVATNHQSREVEMSTRGRFQLTGDPAKGNCSLVIRDAQM |
| | QDESQYFFRVERGSYVRYNFMNDGFFLKVTALTQKPDVYIPETLEPGQPVT |
| | VICVFNWAFEECPPPSFSWTGAALSSQGTKPTTSHFSVLSFTPRPQDHNTDL |
| | TCHVDFSRKGVSAQRTVRLRVAYAPRDLVISISRDNTPALEPQPQGNVPYL |
| | EAQKGQFLRLLCAADSQPPATLSWVLQNRVLSSSHPWGPRPLGLELPGVK |
| | AGDSGRYTCRAENRLGSQQRALDLSVQYPPENLRVMVSQANRTVLENLG |
| | NGTSLPVLEGQSLCLVCVTHSSPPARLSWTQRGQVLSPSQPSDPGVLELPRV |
| | QVEHEGEFTCHARHPLGSQHVSLSLSVHYSPKLLGPSCSWEAEGLHCSCSS |
| | QASPAPSLRWWLGEELLEGNSSQDSFEVTPSSAGPWANSSLSLHGGLSSGL |
| | RLRCEAWNVHGAQSGSILQLPDKKGLIST |
| SEQ ID NO: 380 | EVQLVQSGGGLVKPGGSLRLSCAASGFTFSSYSMNWVRQAPGKGLEWVSS |
| anti-VEGFR HC | ISSSSSYIYYADSVKGRFTISRDNAKNSLYLQMNSLRAEDTAVYYCARVTD |
| fused to SIRPa | AFDIWGQGTMVTVSSASTKGPSVFPLAPSSKSTSGGTAALGCLVKDYFPEP |
| ECD | VTVSWNSGALTSGVHTFPAVLQSSGLYSLSSVVTVPSSSLGTQTYICNVNH |
| | KPSNTKVDKKVEPKSCDKTHTCPPCPAPELLGGPSVFLFPPKPKDTLMISRT |
| | PEVTCVVVDVSHEDPEVKFNWYVDGVEVHNAKTKPREEQYNSTYRVVSV |
| | LTVLHQDWLNGKEYKCKVSNKALPAPIEKTISKAKGQPREPQVYTLPPSRE |
| | EMTKNQVSLTCLVKGFYPSDIAVEWESNGQPENNYKTTPPVLDSDGSFFLY |
| | SKLTVDKSRWQQGNVFSCSVMHEALHNHYTQKSLSLSPGKGGGGSGGGG |
| | SGGGGSEEELQVIQPDKSVLVAAGETATLRCTATSLIPVGPIQWFRGAGPGR |
| | ELIYNQKEGHFPRVTTVSDLTKRNNMDFSIRIGNITPADAGTYYCVKFRKGS |
| | PDDVEFKSGAGTELSVRAKPS |
| SEQ ID NO: 381 | EVQLVQSGGGLVKPGGSLRLSCAASGFTFSSYSMNWVRQAPGKGLEWVSS |
| anti-VEGFR HC | ISSSSSYIYYADSVKGRFTISRDNAKNSLYLQMNSLRAEDTAVYYCARVTD |
| fused to TGFbR | AFDIWGQGTMVTVSSASTKGPSVFPLAPSSKSTSGGTAALGCLVKDYFPEP |
| ECD | VTVSWNSGALTSGVHTFPAVLQSSGLYSLSSVVTVPSSSLGTQTYICNVNH |
| | KPSNTKVDKKVEPKSCDKTHTCPPCPAPELLGGPSVFLFPPKPKDTLMISRT |
| | PEVTCVVVDVSHEDPEVKFNWYVDGVEVHNAKTKPREEQYNSTYRVVSV |
| | LTVLHQDWLNGKEYKCKVSNKALPAPIEKTISKAKGQPREPQVYTLPPSRE |
| | EMTKNQVSLTCLVKGFYPSDIAVEWESNGQPENNYKTTPPVLDSDGSFFLY |
| | SKLTVDKSRWQQGNVFSCSVMHEALHNHYTQKSLSLSPGKGGGGSGGGG |
| | SGGGGSTIPPHVQKSVNNDMIVTDNNGAVKFPQLCKFCDVRFSTCDNQKS |
| | CMSNCSITSICEKPQEVCVAVWRKNDENITLETVCHDPKLPYHDFILEDAAS |
| | PKCIMKEKKKPGETFFMCSCSSDECNDNIIFSEEYNTSNPD |
| SEQ ID NO: 382 | EVQLVQSGGGLVKPGGSLRLSCAASGFTFSSYSMNWVRQAPGKGLEWVSS |
| anti-VEGFR HC | ISSSSSYIYYADSVKGRFTISRDNAKNSLYLQMNSLRAEDTAVYYCARVTD |
| fused to TIM3 | AFDIWGQGTMVTVSSASTKGPSVFPLAPSSKSTSGGTAALGCLVKDYFPEP |
| ECD | VTVSWNSGALTSGVHTFPAVLQSSGLYSLSSVVTVPSSSLGTQTYICNVNH |
| | KPSNTKVDKKVEPKSCDKTHTCPPCPAPELLGGPSVFLFPPKPKDTLMISRT |
| | PEVTCVVVDVSHEDPEVKFNWYVDGVEVHNAKTKPREEQYNSTYRVVSV |
| | LTVLHQDWLNGKEYKCKVSNKALPAPIEKTISKAKGQPREPQVYTLPPSRE |
| | EMTKNQVSLTCLVKGFYPSDIAVEWESNGQPENNYKTTPPVLDSDGSFFLY |
| | SKLTVDKSRWQQGNVFSCSVMHEALHNHYTQKSLSLSPGKGGGGSGGGG |
| | SGGGGSSEVEYRAEVGQNAYLPCFYTPAAPGNLVPVCWGKGACPVFECGN |
| | VVLRTDERDVNYWTSRYWLNGDFRKGDVSLTIENVTLADSGIYCCRIQIPG |
| | IMNDEKFNLKLVIKPAKVTPAPTRQRDFTAAFPRMLTTRGHGPAETQTLGS |
| | LPDINLTQISTLANELRDSRLANDLRDSGATIRIG |
| SEQ ID NO: 383 | QVQLQQPGAELVKPGASVMMSCKASGYTFTNYNMHWVKQTPGQGLEWI |
| anti-CD47 HC | GTIYPGNDDTSYNQKFKDKATLTADKSSSAAYMQLSSLTSEDSAVYYCAR |
| fused to BTLA | GGYRAMDYWGQTSVTVSSASTKGPSVFPLAPSSKSTSGGTAALGCLVKDY |
| ECD | FPEPVTVSWNSGALTSGVHTFPAVLQSSGLYSLSSVVTVPSSSLGTQTYICN |
| | VNHKPSNTKVDKKVEPKSCDKTHTCPPCPAPELLGGPSVFLFPPKPKDTLMI |
| | SRTPEVTCVVVDVSHEDPEVKFNWYVDGVEVHNAKTKPREEQYNSTYRV |
| | VSVLTVLHQDWLNGKEYKCKVSNKALPAPIEKTISKAKGQPREPQVYTLPP |
| | SREEMTKNQVSLTCLVKGFYPSDIAVEWESNGQPENNYKTTPPVLDSDGSF |
| | FLYSKLTVDKSRWQQGNVFSCSVMHEALHNHYTQKSLSLSPGKGGGGSG |
| | GGGSGGGGSKESCDVQLYIKRQSEHSILAGDPFELECPVKYCANRPHVTWC |
| | KLNGTTCVKLEDRQTSWKEEKNISFFILHEEPVLPNDNGSYRCSANFQSNLI |
| | ESHSTTLYVTDVKSASERPSKDEMAS |
| SEQ ID NO: 384 | DVLMTQTPLSLPVSLGDQASISCRSSQSIVYSNGNTYLGWYLQKPGQSPKL |
| anti-CD47 LC | LIYKVSNRFSGVPDRFSGSGSGTDFTLKISRVEAEDLGVYHCFQGSHVPYTF |
| fused to PD1 ECD | GGGTKVEIKRTVAAPSVFIFPPSDEQLKSGTASVVCLLNNFYPREAKVQWK |
| | VDNALQSGNSQESVTEQDSKDSTYSLSSTLTLSKADYEKHKVYACEVTHQ |
| | GLSSPVTKSFNRGECGGGGSGGGGSGGGGSPGWFLDSPDRPWNPPTFSPAL |
| | LVVTEGDNATFTCSFSNTSESFVLNWYRMSPSNQTDKLAAFPEDRSQPGQD |
| | CRFRVTQLPNGRDFHMSVVRARRNDSGTYLCGAISLAPKAQIKESLRAELR |
| | VTERRAEVPTAHPSPSPRPAGQFQTLV |
| SEQ ID NO: 385 | DVLMTQTPLSLPVSLGDQASISCRSSQSIVYSNGNTYLGWYLQKPGQSPKL |
| anti-CD47 LC | LIYKVSNRFSGVPDRFSGSGSGTDFTLKISRVEAEDLGVYHCFQGSHVPYTF |
| fused to | GGGTKVEIKRTVAAPSVFIFPPSDEQLKSGTASVVCLLNNFYPREAKVQWK |
| SIGLEC10 ECD | VDNALQSGNSQESVTEQDSKDSTYSLSSTLTLSKADYEKHKVYACEVTHQ |
| | GLSSPVTKSFNRGECGGGGSGGGGSGGGGSMDGRFWIRVQESVMVPEGLC |
| | ISVPCSFSYPRQDWTGSTPAYGYWFKAVTETTKGAPVATNHQSREVEMST |
| | RGRFQLTGDPAKGNCSLVIRDAQMQDESQYFFRVERGSYVRYNFMNDGFF |
| | LKVTALTQKPDVYIPETLEPGQPVTVICVFNWAFEECPPPSFSWTGAALSSQ |
| | GTKPTTSHFSVLSFTPRPQDHNTDLTCHVDFSRKGVSAQRTVRLRVAYAPR |
| | DLVISISRDNTPALEPQPQGNVPYLEAQKGQFLRLLCAADSQPPATLSWVL |
| | QNRVLSSSHPWGPRPLGLELPGVKAGDSGRYTCRAENRLGSQQRALDLSV |
| | QYPPENLRVMVSQANRTVLENLGNGTSLPVLEGQSLCLVCVTHSSPPARLS |
| | WTQRGQVLSPSQPSDPGVLELPRVQVEHEGEFTCHARHPLGSQHVSLSLSV |
| | HYSPKLLGPSCSWEAEGLHCSCSSQASPAPSLRWWLGEELLEGNSSQDSFE |
| | VTPSSAGPWANSSLSLHGGLSSGLRLRCEAWNVHGAQSGSILQLPDKKGLI |
| | ST |
| SEQ ID NO: 386 | DVLMTQTPLSLPVSLGDQASISCRSSQSIVYSNGNTYLGWYLQKPGQSPKL |
| anti-CD47 LC | LIYKVSNRFSGVPDRFSGSGSGTDFTLKISRVEAEDLGVYHCFQGSHVPYTF |
| fused to TIM3 | GGGTKVEIKRTVAAPSVFIFPPSDEQLKSGTASVVCLLNNFYPREAKVQWK |
| ECD | VDNALQSGNSQESVTEQDSKDSTYSLSSTLTLSKADYEKHKVYACEVTHQ |
| | GLSSPVTKSFNRGECGGGGSGGGGSGGGGSSEVEYRAEVGQNAYLPCFYT |
| | PAAPGNLVPVCWGKGACPVFECGNVVLRTDERDVNYWTSRYWLNGDFR |
| | KGDVSLTIENVTLADSGIYCCRIQIPGIMNDEKFNLKLVIKPAKVTPAPTRQR |
| | DFTAAFPRMLTTRGHGPAETQTLGSLPDINLTQISTLANELRDSRLANDLRD |
| | SGATIRIG |
| SEQ ID NO: 387 | QVQLQQPGAELVKPGASVMNISCKASGYTFTNYNMHWVKQTPGQGLEWI |
| anti-CD47 HC | GTIYPGNDDTSYNQKFKDKATLTADKSSSAAYMQLSSLTSEDSAVYYCAR |
| fused to PD1 ECD | GGYRAMDYWGQTSVTVSSASTKGPSVFPLAPSSKSTSGGTAALGCLVKDY |
| | FPEPVTVSWNSGALTSGVHTFPAVLQSSGLYSLSSVVTVPSSSLGTQTYICN |
| | VNHKPSNTKVDKKVEPKSCDKTHTCPPCPAPELLGGPSVFLFPPKPKDTLMI |
| | SRTPEVTCVVVDVSHEDPEVKFNWYVDGVEVHNAKTKPREEQYNSTYRV |
| | VSVLTVLHQDWLNGKEYKCKVSNKALPAPIEKTISKAKGQPREPQVYTLPP |
| | SREEMTKNQVSLTCLVKGFYPSDIAVEWESNGQPENNYKTTPPVLDSDGSF |
| | FLYSKLTVDKSRWQQGNVFSCSVMHEALHNHYTQKSLSLSPGKGGGGSG |
| | GGGSGGGGSPGWFLDSPDRPWNPPTFSPALLVVTEGDNATFTCSFSNTSESF |
| | VLNWYRMSPSNQTDKLAAFPEDRSQPGQDCRFRVTQLPNGRDFHMSVVR |
| | ARRNDSGTYLCGAISLAPKAQIKESLRAELRVTERRAEVPTAHPSPSPRPAG |
| | QFQTLV |
| SEQ ID NO: 388 | DVLMTQTPLSLPVSLGDQASISCRSSQSIVYSNGNTYLGWYLQKPGQSPKL |
| anti-CD47 LC | LIYKVSNRFSGVPDRFSGSGSGTDFTLKISRVEAEDLGVYHCFQGSHVPYTF |
| fused to BTLA | GGGTKVEIKRTVAAPSVFIFPPSDEQLKSGTASVVCLLNNFYPREAKVQWK |
| ECD | VDNALQSGNSQESVTEQDSKDSTYSLSSTLTLSKADYEKHKVYACEVTHQ |
| | GLSSPVTKSFNRGECGGGGSGGGGSGGGGSKESCDVQLYIKRQSEHSILAG |
| | DPFELECPVKYCANRPHVTWCKLNGTTCVKLEDRQTSWKEEKNISFFILHF |
| | EPVLPNDNGSYRCSANFQSNLIESHSTTLYVTDVKSASERPSKDEMAS |
| SEQ ID NO: 389 | QVQLQQPGAELVKPGASVMMSCKASGYTFTNYNMHWVKQTPGQGLEWI |
| anti-CD47 HC | GTIYPGNDDTSYNQKFKDKATLTADKSSSAAYMQLSSLTSEDSAVYYCAR |
| fused to | GGYRAMDYWGQTSVTVSSASTKGPSVFPLAPSSKSTSGGTAALGCLVKDY |
| SIGLEC10 ECD | FPEPVTVSWNSGALTSGVHTFPAVLQSSGLYSLSSVVTVPSSSLGTQTYICN |
| | VNHKPSNTKVDKKVEPKSCDKTHTCPPCPAPELLGGPSVFLFPPKPKDTLMI |
| | SRTPEVTCVVVDVSHEDPEVKFNWYVDGVEVHNAKTKPREEQYNSTYRV |
| | VSVLTVLHQDWLNGKEYKCKVSNKALPAPIEKTISKAKGQPREPQVYTLPP |
| | SREEMTKNQVSLTCLVKGFYPSDIAVEWESNGQPENNYKTTPPVLDSDGSF |
| | FLYSKLTVDKSRWQQGNVFSCSVMHEALHNHYTQKSLSLSPGKGGGGSG |
| | GGGSGGGGSMDGRFWIRVQESVMVPEGLCISVPCSFSYPRQDWTGSTPAY |
| | GYWFKAVTETTKGAPVATNHQSREVEMSTRGRFQLTGDPAKGNCSLVIRD |
| | AQMQDESQYFFRVERGSYVRYNFMNDGFFLKVTALTQKPDVYIPETLEPG |
| | QPVTVICVFNWAFEECPPPSFSWTGAALSSQGTKPTTSHFSVLSFTPRPQDH |
| | NTDLTCHVDFSRKGVSAQRTVRLRVAYAPRDLVISISRDNTPALEPQPQGN |
| | VPYLEAQKGQFLRLLCAADSQPPATLSWVLQNRVLSSSHPWGPRPLGLELP |
| | GVKAGDSGRYTCRAENRLGSQQRALDLSVQYPPENLRVMVSQANRTVLE |
| | NLGNGTSLPVLEGQSLCLVCVTHSSPPARLSWTQRGQVLSPSQPSDPGVLE |
| | LPRVQVEHEGEFTCHARHPLGSQHVSLSLSVHYSPKLLGPSCSWEAEGLHC |
| | SCSSQASPAPSLRWWLGEELLEGNSSQDSFEVTPSSAGPWANSSLSLHGGLS |
| | SGLRLRCEAWNVHGAQSGSILQLPDKKGLIST |
| SEQ ID NO: 390 | QVQLQQPGAELVKPGASVMMSCKASGYTFTNYNMHWVKQTPGQGLEWI |
| anti-CD47 HC | GTIYPGNDDTSYNQKFKDKATLTADKSSSAAYMQLSSLTSEDSAVYYCAR |
| fused to TGFbR | GGYRAMDYWGQTSVTVSSASTKGPSVFPLAPSSKSTSGGTAALGCLVKDY |
| ECD | FPEPVTVSWNSGALTSGVHTFPAVLQSSGLYSLSSVVTVPSSSLGTQTYICN |
| | VNHKPSNTKVDKKVEPKSCDKTHTCPPCPAPELLGGPSVFLFPPKPKDTLMI |
| | SRTPEVTCVVVDVSHEDPEVKFNWYVDGVEVHNAKTKPREEQYNSTYRV |
| | VSVLTVLHQDWLNGKEYKCKVSNKALPAPIEKTISKAKGQPREPQVYTLPP |
| | SREEMTKNQVSLTCLVKGFYPSDIAVEWESNGQPENNYKTTPPVLDSDGSF |
| | FLYSKLTVDKSRWQQGNVFSCSVMHEALHNHYTQKSLSLSPGKGGGGSG |
| | GGGSGGGGSTIPPHVQKSVNNDMIVTDNNGAVKFPQLCKFCDVRFSTCDN |
| | QKSCMSNCSITSICEKPQEVCVAVWRKNDENITLETVCHDPKLPYHDFILED |
| | AASPKCIMKEKKKPGETFFMCSCSSDECNDNIIFSEEYNTSNPD |
| SEQ ID NO: 391 | QVQLQQPGAELVKPGASVMNISCKASGYTFTNYNMHWVKQTPGQGLEWI |
| anti-CD47 HC | GTIYPGNDDTSYNQKFKDKATLTADKSSSAAYMQLSSLTSEDSAVYYCAR |
| fused to TIM3 | GGYRAMDYWGQTSVTVSSASTKGPSVFPLAPSSKSTSGGTAALGCLVKDY |
| ECD | FPEPVTVSWNSGALTSGVHTFPAVLQSSGLYSLSSVVTVPSSSLGTQTYICN |
| | VNHKPSNTKVDKKVEPKSCDKTHTCPPCPAPELLGGPSVFLFPPKPKDTLMI |
| | SRTPEVTCVVVDVSHEDPEVKFNWYVDGVEVHNAKTKPREEQYNSTYRV |
| | VSVLTVLHQDWLNGKEYKCKVSNKALPAPIEKTISKAKGQPREPQVYTLPP |
| | SREEMTKNQVSLTCLVKGFYPSDIAVEWESNGQPENNYKTTPPVLDSDGSF |
| | FLYSKLTVDKSRWQQGNVFSCSVMHEALHNHYTQKSLSLSPGKGGGGSG |
| | GGGSGGGGSSEVEYRAEVGQNAYLPCFYTPAAPGNLVPVCWGKGACPVF |
| | ECGNVVLRTDERDVNYWTSRYWLNGDFRKGDVSLTIENVTLADSGIYCCR |
| | IQIPGIMNDEKFNLKLVIKPAKVTPAPTRQRDFTAAFPRMLFERGHGPAETQ |
| | TLGSLPDINLTQISTLANELRDSRLANDLRDSGATIRIG |
| SEQ ID NO: 392 | QVQLQQPGAELVKPGASVMMSCKASGYTFTNYNMHWVKQTPGQGLEWI |
| anti-CD47 HC | GTIYPGNDDTSYNQKFKDKATLTADKSSSAAYMQLSSLTSEDSAVYYCAR |
| fused to VEGFR | GGYRAMDYWGQTSVTVSSASTKGPSVFPLAPSSKSTSGGTAALGCLVKDY |
| ECD | FPEPVTVSWNSGALTSGVHTFPAVLQSSGLYSLSSVVTVPSSSLGTQTYICN |
| | VNHKPSNTKVDKKVEPKSCDKTHTCPPCPAPELLGGPSVFLFPPKPKDTLMI |
| | SRTPEVTCVVVDVSHEDPEVKFNWYVDGVEVHNAKTKPREEQYNSTYRV |
| | VSVLTVLHQDWLNGKEYKCKVSNKALPAPIEKTISKAKGQPREPQVYTLPP |
| | SREEMTKNQVSLTCLVKGFYPSDIAVEWESNGQPENNYKTTPPVLDSDGSF |
| | FLYSKLTVDKSRWQQGNVFSCSVMHEALHNHYTQKSLSLSPGKGGGGSG |
| | GGGSGGGGSSDTGRPFVEMYSEIPEIIHMTEGRELVIPCRVTSPNITVTLKKF |
| | PLDTLIPDGKRIIWDSRKGFIISNATYKEIGLLTCEATVNGHLYKTNYLTHRQ |
| | TNTIIDVVLSPSHGIELSVGEKLVLNCTARTELNVGIDFNWEYPSSKHQHKK |
| | LVNRDLKTQSGSEMKKFLSTLTIDGVTRSDQGLYTCAASSGLMTKKNSTFV |
| | RVHEK |
| SEQ ID NO: 393 | QVQLVQSGAEVKKPGSSVKVSCKASGYTFSSNVISWVRQAPGQGLEWMG |
| anti-TGFb HC | GVIPIVDIANYAQRFKGRVTITADESTSTTYMELSSLRSEDTAVYYCASTLG |
| fused to BTLA | LVLDAMDYWGQGTLVTVSSASTKGPSVFPLAPCSRSTSESTAALGCLVKD |
| ECD | YFPEPVTVSWNSGALTSGVHTFPAVLQSSGLYSLSSVVTVPSSSLGTKTYTC |
| | NVDHKPSNTKVDKRVESKYGPPCPSCPAPEFLGGPSVFLFPPKPKDTLMISR |
| | TPEVTCVVVDVSQEDPEVQFNWYVDGVEVHNAKTKPREEQFNSTYRVVS |
| | VLTVLHQDWLNGKEYKCKVSNKGLPSSIEKTISKAKGQPREPQVYTLPPSQ |
| | EEMTKNQVSLTCLVKGFYPSDIAVEWESNGQPENNYKTTPPVLDSDGSFFL |
| | YSRLTVDKSRWQEGNVFSCSVMHEALHNHYTQKSLSLSLGKGGGGSGGG |
| | GSGGGGSKESCDVQLYIKRQSEHSILAGDPFELECPVKYCANRPHVTWCKL |
| | NGTTCVKLEDRQTSWKEEKNISFFILHEEPVLPNDNGSYRCSANFQSNLIES |
| | HSTTLYVTDVKSASERPSKDEMAS |
| SEQ ID NO: 394 | ETVLTQSPGTLSLSPGERATLSCRASQSLGSSYLAWYQQKPGQAPRLLIYGA |
| anti-TGFb LC | SSRAPGIPDRFSGSGSGTDFTLTISRLEPEDFAVYYCQQYADSPITFGQGTRL |
| fused to PD1 ECD | EIKRTVAAPSVFIFPPSDEQLKSGTASVVCLLNNFYPREAKVQWKVDNALQ |
| | SGNSQESVTEQDSKDSTYSLSSTLTLSKADYEKHKVYACEVTHQGLSSPVT |
| | KSFNRGECGGGGSGGGGSGGGGSPGWFLDSPDRPWNPPTFSPALLVVTEG |
| | DNATFTCSFSNTSESFVLNWYRMSPSNQTDKLAAFPEDRSQPGQDCRFRVT |
| | QLPNGRDFHMSVVRARRNDSGTYLCGAISLAPKAQIKESLRAELRVTERRA |
| | EVPTAHPSPSPRPAGQFQTLV |
| SEQ ID NO: 395 | ETVLTQSPGTLSLSPGERATLSCRASQSLGSSYLAWYQQKPGQAPRLLIYGA |
| anti-TGFb LC | SSRAPGIPDRFSGSGSGTDFTLTISRLEPEDFAVYYCQQYADSPITFGQGTRL |
| fused to | EIKRTVAAPSVFIFPPSDEQLKSGTASVVCLLNNFYPREAKVQWKVDNALQ |
| SIGLEC10 ECD | SGNSQESVTEQDSKDSTYSLSSTLTLSKADYEKHKVYACEVTHQGLSSPVT |
| | KSFNRGECGGGGSGGGGSGGGGSMDGRFWIRVQESVMVPEGLCISVPCSF |
| | SYPRQDWTGSTPAYGYWFKAVTETTKGAPVATNHQSREVEMSTRGRFQL |
| | TGDPAKGNCSLVIRDAQMQDESQYFFRVERGSYVRYNFMNDGFFLKVTAL |
| | TQKPDVYIPETLEPGQPVTVICVFNWAFEECPPPSFSWTGAALSSQGTKPTT |
| | SHFSVLSFTPRPQDHNTDLTCHVDFSRKGVSAQRTVRLRVAYAPRDLVISIS |
| | RDNTPALEPQPQGNVPYLEAQKGQFLRLLCAADSQPPATLSWVLQNRVLS |
| | SSHPWGPRPLGLELPGVKAGDSGRYTCRAENRLGSQQRALDLSVQYPPEN |
| | LRVMVSQANRTVLENLGNGTSLPVLEGQSLCLVCVTHSSPPARLSWTQRG |
| | QVLSPSQPSDPGVLELPRVQVEHEGEFTCHARHPLGSQHVSLSLSVHYSPKL |
| | LGPSCSWEAEGLHCSCSSQASPAPSLRWWLGEELLEGNSSQDSFEVTPSSA |
| | GPWANSSLSLHGGLSSGLRLRCEAWNVHGAQSGSILQLPDKKGLIST |
| SEQ ID NO: 396 | ETVLTQSPGTLSLSPGERATLSCRASQSLGSSYLAWYQQKPGQAPRLLIYGA |
| anti-TGFb LC | SSRAPGIPDRFSGSGSGTDFTLTISRLEPEDFAVYYCQQYADSPITFGQGTRL |
| fused to SIRPa | EIKRTVAAPSVFIFPPSDEQLKSGTASVVCLLNNFYPREAKVQWKVDNALQ |
| ECD | SGNSQESVTEQDSKDSTYSLSSTLTLSKADYEKHKVYACEVTHQGLSSPVT |
| | KSFNRGECGGGGSGGGGSGGGGSEEELQVIQPDKSVLVAAGETATLRCTA |
| | TSLIPVGPIQWFRGAGPGRELIYNQKEGHFPRVTTVSDLTKRNNMDFSIRIG |
| | NITPADAGTYYCVKFRKGSPDDVEFKSGAGTELSVRAKPS |
| SEQ ID NO: 397 | ETVLTQSPGTLSLSPGERATLSCRASQSLGSSYLAWYQQKPGQAPRLLIYGA |
| anti-TGFb LC | SSRAPGIPDRFSGSGSGTDFTLTISRLEPEDFAVYYCQQYADSPITFGQGTRL |
| fused to TIM3 | EIKRTVAAPSVFIFPPSDEQLKSGTASVVCLLNNFYPREAKVQWKVDNALQ |
| ECD | SGNSQESVTEQDSKDSTYSLSSTLTLSKADYEKHKVYACEVTHQGLSSPVT |
| | KSFNRGECGGGGSGGGGSGGGGSSEVEYRAEVGQNAYLPCFYTPAAPGNL |
| | VPVCWGKGACPVFECGNVVLRTDERDVNYWTSRYWLNGDFRKGDVSLTI |
| | ENVTLADSGIYCCRIQIPGIMNDEKFNLKLVIKPAKVTPAPTRQRDFTAAFP |
| | RMLTTRGHGPAETQTLGSLPDINLTQISTLANELRDSRLANDLRDSGATIRI |
| | G |
| SEQ ID NO: 398 | QVQLVQSGAEVKKPGSSVKVSCKASGYTFSSNVISWVRQAPGQGLEWMG |
| anti-TGFb HC | GVIPIVDIANYAQRFKGRVTITADESTSTTYMELSSLRSEDTAVYYCASTLG |
| fused to PD1 ECD | LVLDAMDYWGQGTLVTVSSASTKGPSVFPLAPCSRSTSESTAALGCLVKD |
| | YFPEPVTVSWNSGALTSGVHTFPAVLQSSGLYSLSSVVTVPSSSLGTKTYTC |
| | NVDHKPSNTKVDKRVESKYGPPCPSCPAPEFLGGPSVFLFPPKPKDTLMISR |
| | TPEVTCVVVDVSQEDPEVQFNWYVDGVEVHNAKTKPREEQFNSTYRVVS |
| | VLTVLHQDWLNGKEYKCKVSNKGLPSSIEKTISKAKGQPREPQVYTLPPSQ |
| | EEMTKNQVSLTCLVKGFYPSDIAVEWESNGQPENNYKTTPPVLDSDGSFFL |
| | YSRLTVDKSRWQEGNVFSCSVMHEALHNHYTQKSLSLSLGKGGGGSGGG |
| | GSGGGGSPGWFLDSPDRPWNPPTFSPALLVVTEGDNATFTCSFSNTSESFVL |
| | NWYRMSPSNQTDKLAAFPEDRSQPGQDCRFRVTQLPNGRDFHMSVVRAR |
| | RNDSGTYLCGAISLAPKAQIKESLRAELRVTERRAEVPTAHPSPSPRPAGQF |
| | QTLV |
| SEQ ID NO: 399 | ETVLTQSPGTLSLSPGERATLSCRASQSLGSSYLAWYQQKPGQAPRLLIYGA |
| anti-TGFb LC | SSRAPGIPDRFSGSGSGTDFTLTISRLEPEDFAVYYCQQYADSPITFGQGTRL |
| fused to BTLA | EIKRTVAAPSVFIFPPSDEQLKSGTASVVCLLNNFYPREAKVQWKVDNALQ |
| ECD | SGNSQESVTEQDSKDSTYSLSSTLTLSKADYEKHKVYACEVTHQGLSSPVT |
| | KSFNRGECGGGGSGGGGSGGGGSKESCDVQLYIKRQSEHSILAGDPFELEC |
| | PVKYCANRPHVTWCKLNGTTCVKLEDRQTSWKEEKNISFFILHFEPVLPND |
| | NGSYRCSANFQSNLIESHSTTLYVTDVKSASERPSKDEMAS |
| SEQ ID NO: 400 | QVQLVQSGAEVKKPGSSVKVSCKASGYTFSSNVISWVRQAPGQGLEWMG |
| anti-TGFb HC | GVIPIVDIANYAQRFKGRVTITADESTSTTYMELSSLRSEDTAVYYCASTLG |
| fused to | LVLDAMDYWGQGTLVTVSSASTKGPSVFPLAPCSRSTSESTAALGCLVKD |
| SIGLEC10 ECD | YFPEPVTVSWNSGALTSGVHTFPAVLQSSGLYSLSSVVTVPSSSLGTKTYTC |
| | NVDHKPSNTKVDKRVESKYGPPCPSCPAPEFLGGPSVFLFPPKPKDTLMISR |
| | TPEVTCVVVDVSQEDPEVQFNWYVDGVEVHNAKTKPREEQFNSTYRVVS |
| | VLTVLHQDWLNGKEYKCKVSNKGLPSSIEKTISKAKGQPREPQVYTLPPSQ |
| | EEMTKNQVSLTCLVKGFYPSDIAVEWESNGQPENNYKTTPPVLDSDGSFFL |
| | YSRLTVDKSRWQEGNVFSCSVMHEALHNHYTQKSLSLSLGKGGGGSGGG |
| | GSGGGGSMDGRFWIRVQESVMVPEGLCISVPCSFSYPRQDWTGSTPAYGY |
| | WFKAVTETTKGAPVATNHQSREVEMSTRGRFQLTGDPAKGNCSLVIRDAQ |
| | MQDESQYFFRVERGSYVRYNFMNDGFFLKVTALTQKPDVYIPETLEPGQP |
| | VTVICVFNWAFEECPPPSFSWTGAALSSQGTKPTTSHFSVLSFTPRPQDHNT |
| | DLTCHVDFSRKGVSAQRTVRLRVAYAPRDLVISISRDNTPALEPQPQGNVP |
| | YLEAQKGQFLRLLCAADSQPPATLSWVLQNRVLSSSHPWGPRPLGLELPGV |
| | KAGDSGRYTCRAENRLGSQQRALDLSVQYPPENLRVMVSQANRTVLENL |
| | GNGTSLPVLEGQSLCLVCVTHSSPPARLSWTQRGQVLSPSQPSDPGVLELPR |
| | VQVEHEGEFTCHARHPLGSQHVSLSLSVHYSPKLLGPSCSWEAEGLHCSCS |
| | SQASPAPSLRWWLGEELLEGNSSQDSFEVTPSSAGPWANSSLSLHGGLSSG |
| | LRLRCEAWNVHGAQSGSILQLPDKKGLIST |
| SEQ ID NO: 401 | QVQLVQSGAEVKKPGSSVKVSCKASGYTFSSNVISWVRQAPGQGLEWMG |
| anti-TGFb HC | GVIPIVDIANYAQRFKGRVTITADESTSTTYMELSSLRSEDTAVYYCASTLG |
| fused to SIRPa | LVLDAMDYWGQGTLVTVSSASTKGPSVFPLAPCSRSTSESTAALGCLVKD |
| ECD | YFPEPVTVSWNSGALTSGVHTFPAVLQSSGLYSLSSVVTVPSSSLGTKTYTC |
| | NVDHKPSNTKVDKRVESKYGPPCPSCPAPEFLGGPSVFLFPPKPKDTLMISR |
| | TPEVTCVVVDVSQEDPEVQFNWYVDGVEVHNAKTKPREEQFNSTYRVVS |
| | VLTVLHQDWLNGKEYKCKVSNKGLPSSIEKTISKAKGQPREPQVYTLPPSQ |
| | EEMTKNQVSLTCLVKGFYPSDIAVEWESNGQPENNYKTTPPVLDSDGSFFL |
| | YSRLTVDKSRWQEGNVFSCSVMHEALHNHYTQKSLSLSLGKGGGGSGGG |
| | GSGGGGSEEELQVIQPDKSVLVAAGETATLRCTATSLIPVGPIQWFRGAGPG |
| | RELIYNQKEGHFPRVTTVSDLTKRNNMDFSIRIGNITPADAGTYYCVKFRK |
| | GSPDDVEFKSGAGTELSVRAKPS |
| SEQ ID NO: 402 | QVQLVQSGAEVKKPGSSVKVSCKASGYTFSSNVISWVRQAPGQGLEWMG |
| anti-TGFb HC | GVIPIVDIANYAQRFKGRVTITADESTSTTYMELSSLRSEDTAVYYCASTLG |
| fused to TIM3 | LVLDAMDYWGQGTLVTVSSASTKGPSVFPLAPCSRSTSESTAALGCLVKD |
| ECD | YFPEPVTVSWNSGALTSGVHTFPAVLQSSGLYSLSSVVTVPSSSLGTKTYTC |
| | NVDHKPSNTKVDKRVESKYGPPCPSCPAPEFLGGPSVFLFPPKPKDTLMISR |
| | TPEVTCVVVDVSQEDPEVQFNWYVDGVEVHNAKTKPREEQFNSTYRVVS |
| | VLTVLHQDWLNGKEYKCKVSNKGLPSSIEKTISKAKGQPREPQVYTLPPSQ |
| | EEMTKNQVSLTCLVKGFYPSDIAVEWESNGQPENNYKTTPPVLDSDGSFFL |
| | YSRLTVDKSRWQEGNVFSCSVMHEALHNHYTQKSLSLSLGKGGGGSGGG |
| | GSGGGGSSEVEYRAEVGQNAYLPCFYTPAAPGNLVPVCWGKGACPVFECG |
| | NVVLRTDERDVNYWTSRYWLNGDFRKGDVSLTIENVTLADSGIYCCRIQIP |
| | GIMNDEKFNLKLVIKPAKVTPAPTRQRDFTAAFPRMLTTRGHGPAETQTLG |
| | SLPDINLTQISTLANELRDSRLANDLRDSGATIRIG |
| SEQ ID NO: 403 | QVQLVQSGAEVKKPGSSVKVSCKASGYTFSSNVISWVRQAPGQGLEWMG |
| anti-TGFb HC | GVIPIVDIANYAQRFKGRVTITADESTSTTYMELSSLRSEDTAVYYCASTLG |
| fused to VEGFR | LVLDAMDYWGQGTLVTVSSASTKGPSVFPLAPCSRSTSESTAALGCLVKD |
| ECD | YFPEPVTVSWNSGALTSGVHTFPAVLQSSGLYSLSSVVTVPSSSLGTKTYTC |
| | NVDHKPSNTKVDKRVESKYGPPCPSCPAPEFLGGPSVFLFPPKPKDTLMISR |
| | TPEVTCVVVDVSQEDPEVQFNWYVDGVEVHNAKTKPREEQFNSTYRVVS |
| | VLTVLHQDWLNGKEYKCKVSNKGLPSSIEKTISKAKGQPREPQVYTLPPSQ |
| | EEMTKNQVSLTCLVKGFYPSDIAVEWESNGQPENNYKTTPPVLDSDGSFFL |
| | YSRLTVDKSRWQEGNVFSCSVMHEALHNHYTQKSLSLSLGKGGGGSGGG |
| | GSGGGGSSDTGRPFVEMYSEIPEIIHMTEGRELVIPCRVTSPNITVTLKKFPL |
| | DTLIPDGKRIIWDSRKGFIISNATYKEIGLLTCEATVNGHLYKTNYLTHRQT |
| | NTIIDVVLSPSHGIELSVGEKLVLNCTARTELNVGIDFNWEYPSSKHQHKKL |
| | VNRDLKTQSGSEMKKFLSTLTIDGVTRSDQGLYTCAASSGLMTKKNSTFVR |
| | VHEK |
| SEQ ID NO: 404 | DVQLQESGPGLVKPSQSLSLTCSVTGYSITSGYYWNWIRQFPGNKLEWMG |
| anti-LAP HC | YISYDGTNNYNPSLKNRISITRDTSKHQFFLKLNSVTTEDTATYYCARSFYN |
| fused to BTLA | NYFDFWGQGTTLTVSSASTKGPSVFPLAPSSKSTSGGTAALGCLVKDYFPE |
| ECD | PVTVSWNSGALTSGVHTFPAVLQSSGLYSLSSVVTVPSSSLGTQTYICNVNH |
| | KPSNTKVDKKVEPKSCDKTHTCPPCPAPELLGGPSVFLFPPKPKDTLMISRT |
| | PEVTCVVVDVSHEDPEVKFNWYVDGVEVHNAKTKPREEQYNSTYRVVSV |
| | LTVLHQDWLNGKEYKCKVSNKALPAPIEKTISKAKGQPREPQVYTLPPSRE |
| | EMTKNQVSLTCLVKGFYPSDIAVEWESNGQPENNYKTTPPVLDSDGSFFLY |
| | SKLTVDKSRWQQGNVFSCSVMHEALHNHYTQKSLSLSPGKGGGGSGGGG |
| | SGGGGSKESCDVQLYIKRQSEHSILAGDPFELECPVKYCANRPHVTWCKLN |
| | GTTCVKLEDRQTSWKEEKNISFFILHFEPVLPNDNGSYRCSANFQSNLIESHS |
| | TTLYVTDVKSASERPSKDEMAS |
| SEQ ID NO: 405 | DVQLQESGPGLVKPSQSLSLTCSVTGYSITSGYYWNWIRQFPGNKLEWMG |
| anti-LAP HC | YISYDGTNNYNPSLKNRISITRDTSKHQFFLKLNSVTTEDTATYYCARSFYN |
| fused to PD1 ECD | NYFDFWGQGTTLTVSSASTKGPSVFPLAPSSKSTSGGTAALGCLVKDYFPE |
| | PVTVSWNSGALTSGVHTFPAVLQSSGLYSLSSVVTVPSSSLGTQTYICNVNH |
| | KPSNTKVDKKVEPKSCDKTHTCPPCPAPELLGGPSVFLFPPKPKDTLMISRT |
| | PEVTCVVVDVSHEDPEVKFNWYVDGVEVHNAKTKPREEQYNSTYRVVSV |
| | LTVLHQDWLNGKEYKCKVSNKALPAPIEKTISKAKGQPREPQVYTLPPSRE |
| | EMTKNQVSLTCLVKGFYPSDIAVEWESNGQPENNYKTTPPVLDSDGSFFLY |
| | SKLTVDKSRWQQGNVFSCSVMHEALHNHYTQKSLSLSPGKGGGGSGGGG |
| | SGGGGSPGWFLDSPDRPWNPPTFSPALLVVTEGDNATFTCSFSNTSESFVLN |
| | WYRMSPSNQTDKLAAFPEDRSQPGQDCRFRVTQLPNGRDFHMSVVRARR |
| | NDSGTYLCGAISLAPKAQIKESLRAELRVTERRAEVPTAHPSPSPRPAGQFQ |
| | TLV |
| SEQ ID NO: 406 | DVQLQESGPGLVKPSQSLSLTCSVTGYSITSGYYWNWIRQFPGNKLEWMG |
| anti-LAP HC | YISYDGTNNYNPSLKNRISITRDTSKHQFFLKLNSVTTEDTATYYCARSFYN |
| fused to | NYFDFWGQGTTLTVSSASTKGPSVFPLAPSSKSTSGGTAALGCLVKDYFPE |
| SIGLEC10 ECD | PVTVSWNSGALTSGVHTFPAVLQSSGLYSLSSVVTVPSSSLGTQTYICNVNH |
| | KPSNTKVDKKVEPKSCDKTHTCPPCPAPELLGGPSVFLFPPKPKDTLMISRT |
| | PEVTCVVVDVSHEDPEVKFNWYVDGVEVHNAKTKPREEQYNSTYRVVSV |
| | LTVLHQDWLNGKEYKCKVSNKALPAPIEKTISKAKGQPREPQVYTLPPSRE |
| | EMTKNQVSLTCLVKGFYPSDIAVEWESNGQPENNYKTTPPVLDSDGSFFLY |
| | SKLTVDKSRWQQGNVFSCSVMHEALHNHYTQKSLSLSPGKGGGGSGGGG |
| | SGGGGSMDGRFWIRVQESVMVPEGLCISVPCSFSYPRQDWTGSTPAYGYW |
| | FKAVTETTKGAPVATNHQSREVEMSTRGRFQLTGDPAKGNCSLVIRDAQM |
| | QDESQYFFRVERGSYVRYNFMNDGFFLKVTALTQKPDVYIPETLEPGQPVT |
| | VICVFNWAFEECPPPSFSWTGAALSSQGTKPTTSHFSVLSFTPRPQDHNTDL |
| | TCHVDFSRKGVSAQRTVRLRVAYAPRDLVISISRDNTPALEPQPQGNVPYL |
| | EAQKGQFLRLLCAADSQPPATLSWVLQNRVLSSSHPWGPRPLGLELPGVK |
| | AGDSGRYTCRAENRLGSQQRALDLSVQYPPENLRVMVSQANRTVLENLG |
| | NGTSLPVLEGQSLCLVCVTHSSPPARLSWTQRGQVLSPSQPSDPGVLELPRV |
| | QVEHEGEFTCHARHPLGSQHVSLSLSVHYSPKLLGPSCSWEAEGLHCSCSS |
| | QASPAPSLRWWLGEELLEGNSSQDSFEVTPSSAGPWANSSLSLHGGLSSGL |
| | RLRCEAWNVHGAQSGSILQLPDKKGLIST |
| SEQ ID NO: 407 | DVQLQESGPGLVKPSQSLSLTCSVTGYSITSGYYWNWIRQFPGNKLEWMG |
| anti-LAP HC | YISYDGTNNYNPSLKNRISITRDTSKHQFFLKLNSVTTEDTATYYCARSFYN |
| fused to SIRPa | NYFDFWGQGTTLTVSSASTKGPSVFPLAPSSKSTSGGTAALGCLVKDYFPE |
| ECD | PVTVSWNSGALTSGVHTFPAVLQSSGLYSLSSVVTVPSSSLGTQTYICNVNH |
| | KPSNTKVDKKVEPKSCDKTHTCPPCPAPELLGGPSVFLFPPKPKDTLMISRT |
| | PEVTCVVVDVSHEDPEVKFNWYVDGVEVHNAKTKPREEQYNSTYRVVSV |
| | LTVLHQDWLNGKEYKCKVSNKALPAPIEKTISKAKGQPREPQVYTLPPSRE |
| | EMTKNQVSLTCLVKGFYPSDIAVEWESNGQPENNYKTTPPVLDSDGSFFLY |
| | SKLTVDKSRWQQGNVFSCSVMHEALHNHYTQKSLSLSPGKGGGGSGGGG |
| | SGGGGSEEELQVIQPDKSVLVAAGETATLRCTATSLIPVGPIQWFRGAGPGR |
| | ELIYNQKEGHFPRVTTVSDLTKRNNMDFSIRIGNITPADAGTYYCVKFRKGS |
| | PDDVEFKSGAGTELSVRAKPS |
| SEQ ID NO: 408 | DVQLQESGPGLVKPSQSLSLTCSVTGYSITSGYYWNWIRQFPGNKLEWMG |
| anti-LAP HC | YISYDGTNNYNPSLKNRISITRDTSKHQFFLKLNSVTTEDTATYYCARSFYN |
| fused to TIM3 | NYFDFWGQGTTLTVSSASTKGPSVFPLAPSSKSTSGGTAALGCLVKDYFPE |
| ECD | PVTVSWNSGALTSGVHTFPAVLQSSGLYSLSSVVTVPSSSLGTQTYICNVNH |
| | KPSNTKVDKKVEPKSCDKTHTCPPCPAPELLGGPSVFLFPPKPKDTLMISRT |
| | PEVTCVVVDVSHEDPEVKFNWYVDGVEVHNAKTKPREEQYNSTYRVVSV |
| | LTVLHQDWLNGKEYKCKVSNKALPAPIEKTISKAKGQPREPQVYTLPPSRE |
| | EMTKNQVSLTCLVKGFYPSDIAVEWESNGQPENNYKTTPPVLDSDGSFFLY |
| | SKLTVDKSRWQQGNVFSCSVMHEALHNHYTQKSLSLSPGKGGGGSGGGG |
| | SGGGGSSEVEYRAEVGQNAYLPCFYTPAAPGNLVPVCWGKGACPVFECGN |
| | VVLRTDERDVNYWTSRYWLNGDFRKGDVSLTIENVTLADSGIYCCRIQIPG |
| | IMNDEKFNLKLVIKPAKVTPAPTRQRDFTAAFPRMLTTRGHGPAETQTLGS |
| | LPDINLTQISTLANELRDSRLANDLRDSGATIRIG |
| SEQ ID NO: 409 | DVQLQESGPGLVKPSQSLSLTCSVTGYSITSGYYWNWIRQFPGNKLEWMG |
| anti-LAP HC | YISYDGTNNYNPSLKNRISITRDTSKHQFFLKLNSVTTEDTATYYCARSFYN |
| fused to VEGFR | NYFDFWGQGTTLTVSSASTKGPSVFPLAPSSKSTSGGTAALGCLVKDYFPE |
| ECD | PVTVSWNSGALTSGVHTFPAVLQSSGLYSLSSVVTVPSSSLGTQTYICNVNH |
| | KPSNTKVDKKVEPKSCDKTHTCPPCPAPELLGGPSVFLFPPKPKDTLMISRT |
| | PEVTCVVVDVSHEDPEVKFNWYVDGVEVHNAKTKPREEQYNSTYRVVSV |
| | LTVLHQDWLNGKEYKCKVSNKALPAPIEKTISKAKGQPREPQVYTLPPSRE |
| | EMTKNQVSLTCLVKGFYPSDIAVEWESNGQPENNYKTTPPVLDSDGSFFLY |
| | SKLTVDKSRWQQGNVFSCSVMHEALHNHYTQKSLSLSPGKGGGGSGGGG |
| | SGGGGSSDTGRPFVEMYSEIPEIIHMTEGRELVIPCRVTSPNITVTLKKFPLDT |
| | LIPDGKRIIWDSRKGFIISNATYKEIGLLTCEATVNGHLYKTNYLTHRQTNTI |
| | IDVVLSPSHGIELSVGEKLVLNCTARTELNVGIDFNWEYPSSKHQHKKLVN |
| | RDLKTQSGSEMKKFLSTLTIDGVTRSDQGLYTCAASSGLMTKKNSTFVRVH |
| | EK |
| SEQ ID NO: 410 | QVQLVQPGAEVRKPGASVKVSCKASGYRFTSYYIDWVRQAPGQGLEWMG |
| anti-GARP HC | RIDPEDAGTKYAQKFQGRVTMTADTSTSTVYVELSSLRSEDTAVYYCARY |
| fused to BTLA | EWETVVVGDLMYEYEYWGQGTLVTVSSASTKGPSVFPLAPCSRSTSESTA |
| ECD | ALGCLVKDYFPEPVTVSWNSGALTSGVHTFPAVLQSSGLYSLSSVVTVPSS |
| | SLGTKTYTCNVDHKPSNTKVDKRVESKYGPPCPPCPAPEFLGGPSVFLFPPK |
| | PKDTLMISRTPEVTCVVVDVSQEDPEVQFNWYVDGVEVHNAKTKPREEQF |
| | NSTYRVVSVLTVLHQDWLNGKEYKCKVSNKGLPSSIEKTISKAKGQPREPQ |
| | VYTLPPSQEEMTKNQVSLTCLVKGFYPSDIAVEWESNGQPENNYKTTPPVL |
| | DSDGSFFLYSRLTVDKSRWQEGNVFSCSVMHEALHNHYTQKSLSLSLGGG |
| | GGSGGGGSGGGGSKESCDVQLYIKRQSEHSILAGDPFELECPVKYCANRPH |
| | VTWCKLNGTTCVKLEDRQTSWKEEKNISFFILHFEPVLPNDNGSYRCSANF |
| | QSNLIESHSTTLYVTDVKSASERPSKDEMAS |
| SEQ ID NO: 411 | QVQLVQPGAEVRKPGASVKVSCKASGYRFTSYYIDWVRQAPGQGLEWMG |
| anti-GARP HC | RIDPEDAGTKYAQKFQGRVTMTADTSTSTVYVELSSLRSEDTAVYYCARY |
| fused to PD1 ECD | EWETVVVGDLMYEYEYWGQGTLVTVSSASTKGPSVFPLAPCSRSTSESTA |
| | ALGCLVKDYFPEPVTVSWNSGALTSGVHTFPAVLQSSGLYSLSSVVTVPSS |
| | SLGTKTYTCNVDHKPSNTKVDKRVESKYGPPCPPCPAPEFLGGPSVFLFPPK |
| | PKDTLMISRTPEVTCVVVDVSQEDPEVQFNWYVDGVEVHNAKTKPREEQF |
| | NSTYRVVSVLTVLHQDWLNGKEYKCKVSNKGLPSSIEKTISKAKGQPREPQ |
| | VYTLPPSQEEMTKNQVSLTCLVKGFYPSDIAVEWESNGQPENNYKTTPPVL |
| | DSDGSFFLYSRLTVDKSRWQEGNVFSCSVMHEALHNHYTQKSLSLSLGGG |
| | GGSGGGGSGGGGSPGWFLDSPDRPWNPPTFSPALLVVTEGDNATFTCSFSN |
| | TSESFVLNWYRMSPSNQTDKLAAFPEDRSQPGQDCRFRVTQLPNGRDFHM |
| | SVVRARRNDSGTYLCGAISLAPKAQIKESLRAELRVTERRAEVPTAHPSPSP |
| | RPAGQFQTLV |
| SEQ ID NO: 412 | QVQLVQPGAEVRKPGASVKVSCKASGYRFTSYYIDWVRQAPGQGLEWMG |
| anti-GARP HC | RIDPEDAGTKYAQKFQGRVTMTADTSTSTVYVELSSLRSEDTAVYYCARY |
| fused to | EWETVVVGDLMYEYEYWGQGTLVTVSSASTKGPSVFPLAPCSRSTSESTA |
| SIGLEC10 ECD | ALGCLVKDYFPEPVTVSWNSGALTSGVHTFPAVLQSSGLYSLSSVVTVPSS |
| | SLGTKTYTCNVDHKPSNTKVDKRVESKYGPPCPPCPAPEFLGGPSVFLFPPK |
| | PKDTLMISRTPEVTCVVVDVSQEDPEVQFNWYVDGVEVHNAKTKPREEQF |
| | NSTYRVVSVLTVLHQDWLNGKEYKCKVSNKGLPSSIEKTISKAKGQPREPQ |
| | VYTLPPSQEEMTKNQVSLTCLVKGFYPSDIAVEWESNGQPENNYKTTPPVL |
| | DSDGSFFLYSRLTVDKSRWQEGNVFSCSVMHEALHNHYTQKSLSLSLGGG |
| | GGSGGGGSGGGGSMDGRFWIRVQESVMVPEGLCISVPCSFSYPRQDWTGS |
| | TPAYGYWFKAVTETTKGAPVATNHQSREVEMSTRGRFQLTGDPAKGNCSL |
| | VIRDAQMQDESQYFFRVERGSYVRYNFMNDGFFLKVTALTQKPDVYIPET |
| | LEPGQPVTVICVFNWAFEECPPPSFSWTGAALSSQGTKPTTSHFSVLSFTPRP |
| | QDHNTDLTCHVDFSRKGVSAQRTVRLRVAYAPRDLVISISRDNTPALEPQP |
| | QGNVPYLEAQKGQFLRLLCAADSQPPATLSWVLQNRVLSSSHPWGPRPLG |
| | LELPGVKAGDSGRYTCRAENRLGSQQRALDLSVQYPPENLRVMVSQANRT |
| | VLENLGNGTSLPVLEGQSLCLVCVTHSSPPARLSWTQRGQVLSPSQPSDPG |
| | VLELPRVQVEHEGEFTCHARHPLGSQHVSLSLSVHYSPKLLGPSCSWEAEG |
| | LHCSCSSQASPAPSLRWWLGEELLEGNSSQDSFEVTPSSAGPWANSSLSLH |
| | GGLSSGLRLRCEAWNVHGAQSGSILQLPDKKGLIST |
| SEQ ID NO: 413 | QVQLVQPGAEVRKPGASVKVSCKASGYRFTSYYIDWVRQAPGQGLEWMG |
| anti-GARP HC | RIDPEDAGTKYAQKFQGRVTMTADTSTSTVYVELSSLRSEDTAVYYCARY |
| fused to SIRPa | EWETVVVGDLMYEYEYWGQGTLVTVSSASTKGPSVFPLAPCSRSTSESTA |
| ECD | ALGCLVKDYFPEPVTVSWNSGALTSGVHTFPAVLQSSGLYSLSSVVTVPSS |
| | SLGTKTYTCNVDHKPSNTKVDKRVESKYGPPCPPCPAPEFLGGPSVFLFPPK |
| | PKDTLMISRTPEVTCVVVDVSQEDPEVQFNWYVDGVEVHNAKTKPREEQF |
| | NSTYRVVSVLTVLHQDWLNGKEYKCKVSNKGLPSSIEKTISKAKGQPREPQ |
| | VYTLPPSQEEMTKNQVSLTCLVKGFYPSDIAVEWESNGQPENNYKTTPPVL |
| | DSDGSFFLYSRLTVDKSRWQEGNVFSCSVMHEALHNHYTQKSLSLSLGGG |
| | GGSGGGGSGGGGSEEELQVIQPDKSVLVAAGETATLRCTATSLIPVGPIQW |
| | FRGAGPGRELIYNQKEGHFPRVTTVSDLTKRNNMDFSIRIGNITPADAGTYY |
| | CVKFRKGSPDDVEFKSGAGTELSVRAKPS |
| SEQ ID NO: 414 | QVQLVQPGAEVRKPGASVKVSCKASGYRFTSYYIDWVRQAPGQGLEWMG |
| anti-GARP HC | RIDPEDAGTKYAQKFQGRVTMTADTSTSTVYVELSSLRSEDTAVYYCARY |
| fused to TIM3 | EWETVVVGDLMYEYEYWGQGTLVTVSSASTKGPSVFPLAPCSRSTSESTA |
| ECD | ALGCLVKDYFPEPVTVSWNSGALTSGVHTFPAVLQSSGLYSLSSVVTVPSS |
| | SLGTKTYTCNVDHKPSNTKVDKRVESKYGPPCPPCPAPEFLGGPSVFLFPPK |
| | PKDTLMISRTPEVTCVVVDVSQEDPEVQFNWYVDGVEVHNAKTKPREEQF |
| | NSTYRVVSVLTVLHQDWLNGKEYKCKVSNKGLPSSIEKTISKAKGQPREPQ |
| | VYTLPPSQEEMTKNQVSLTCLVKGFYPSDIAVEWESNGQPENNYKTTPPVL |
| | DSDGSFFLYSRLTVDKSRWQEGNVFSCSVMHEALHNHYTQKSLSLSLGGG |
| | GGSGGGGSGGGGSSEVEYRAEVGQNAYLPCFYTPAAPGNLVPVCWGKGA |
| | CPVFECGNVVLRTDERDVNYWTSRYWLNGDFRKGDVSLTIENVTLADSGI |
| | YCCRIQIPGIMNDEKFNLKLVIKPAKVTPAPTRQRDFTAAFPRMLTTRGHGP |
| | AETQTLGSLPDINLTQISTLANELRDSRLANDLRDSGATIRIG |
| SEQ ID NO: 415 | QVQLVQPGAEVRKPGASVKVSCKASGYRFTSYYIDWVRQAPGQGLEWMG |
| anti-GARP HC | RIDPEDAGTKYAQKFQGRVTMTADTSTSTVYVELSSLRSEDTAVYYCARY |
| fused to VEGFR | EWETVVVGDLMYEYEYWGQGTLVTVSSASTKGPSVFPLAPCSRSTSESTA |
| ECD | ALGCLVKDYFPEPVTVSWNSGALTSGVHTFPAVLQSSGLYSLSSVVTVPSS |
| | SLGTKTYTCNVDHKPSNTKVDKRVESKYGPPCPPCPAPEFLGGPSVFLFPPK |
| | PKDTLMISRTPEVTCVVVDVSQEDPEVQFNWYVDGVEVHNAKTKPREEQF |
| | NSTYRVVSVLTVLHQDWLNGKEYKCKVSNKGLPSSIEKTISKAKGQPREPQ |
| | VYTLPPSQEEMTKNQVSLTCLVKGFYPSDIAVEWESNGQPENNYKTTPPVL |
| | DSDGSFFLYSRLTVDKSRWQEGNVFSCSVMHEALHNHYTQKSLSLSLGGG |
| | GGSGGGGSGGGGSSDTGRPFVEMYSEIPEIIHMTEGRELVIPCRVTSPNITVT |
| | LKKFPLDTLIPDGKRIIWDSRKGFIISNATYKEIGLLTCEATVNGHLYKTNYL |
| | THRQTNTIIDVVLSPSHGIELSVGEKLVLNCTARTELNVGIDFNWEYPSSKH |
| | QHKKLVNRDLKTQSGSEMKKFLSTLTIDGVTRSDQGLYTCAASSGLMTKK |
| | NSTFVRVHEK |
| SEQ ID NO: 416 | EVQLVQSGAEVKKPGESLKISCKASGYAFSSSWINWVRQMPGKGLEWMG |
| anti-CD73 HC | RIYPRAGDTNYAGKFKDQVTISADKSISTAYLQWSSLKASDTAMYYCASLL |
| fused to BTLA | DYSMDYWGQGTLVTVSSASTKGPSVFPLAPSSKSTSGGTAALGCLVKDYF |
| ECD | PEPVTVSWNSGALTSGVHTFPAVLQSSGLYSLSSVVTVPSSSLGTQTYICNV |
| | NHKPSNTKVDKKVEPKSCDKTHTCPPCPAPELLGGPSVFLFPPKPKDTLMIS |
| | RTPEVTCVVVDVSHEDPEVKFNWYVDGVEVHNAKTKPREEQYNSTYRVV |
| | SVLTVLHQDWLNGKEYKCKVSNKALPAPIEKTISKAKGQPREPQVYTLPPS |
| | REEMTKNQVSLTCLVKGFYPSDIAVEWESNGQPENNYKTTPPVLDSDGSFF |
| | LYSKLTVDKSRWQQGNVFSCSVMHEALHNHYTQKSLSLSPGKGGGGSGG |
| | GGSGGGGSKESCDVQLYIKRQSEHSILAGDPFELECPVKYCANRPHVTWCK |
| | LNGTTCVKLEDRQTSWKEEKNISFFILHFEPVLPNDNGSYRCSANFQSNLIE |
| | SHSTTLYVTDVKSASERPSKDEMAS |
| SEQ ID NO: 417 | DIQMTQSPSSLSASVGDRVTITCRASQDISNYLNWYQQKPGKAPKLLIYYTS |
| anti-CD73 LC | RLHSGVPSRFSGSGSGTDFTFTISSLQPEDIATYYCQQGNTLPLTFGQGTKVE |
| fused to PD1 ECD | IKRTVAAPSVFIFPPSDEQLKSGTASVVCLLNNFYPREAKVQWKVDNALQS |
| | GNSQESVTEQDSKDSTYSLSSTLTLSKADYEKHKVYACEVTHQGLSSPVTK |
| | SFNRGECGGGGSGGGGSGGGGSPGWFLDSPDRPWNPPTFSPALLVVTEGD |
| | NATFTCSFSNTSESFVLNWYRMSPSNQTDKLAAFPEDRSQPGQDCRFRVTQ |
| | LPNGRDFHMSVVRARRNDSGTYLCGAISLAPKAQIKESLRAELRVTERRAE |
| | VPTAHPSPSPRPAGQFQTLV |
| SEQ ID NO: 418 | DIQMTQSPSSLSASVGDRVTITCRASQDISNYLNWYQQKPGKAPKLLIYYTS |
| anti-CD73 LC | RLHSGVPSRFSGSGSGTDFTFTISSLQPEDIATYYCQQGNTLPLTFGQGTKVE |
| fused to | IKRTVAAPSVFIFPPSDEQLKSGTASVVCLLNNFYPREAKVQWKVDNALQS |
| SIGLEC10 ECD | GNSQESVTEQDSKDSTYSLSSTLTLSKADYEKHKVYACEVTHQGLSSPVTK |
| | SFNRGECGGGGSGGGGSGGGGSMDGRFWIRVQESVMVPEGLCISVPCSFS |
| | YPRQDWTGSTPAYGYWFKAVTETTKGAPVATNHQSREVEMSTRGRFQLT |
| | GDPAKGNCSLVIRDAQMQDESQYFFRVERGSYVRYNFMNDGFFLKVTALT |
| | QKPDVYIPETLEPGQPVTVICVFNWAFEECPPPSFSWTGAALSSQGTKPTTS |
| | HFSVLSFTPRPQDHNTDLTCHVDFSRKGVSAQRTVRLRVAYAPRDLVISISR |
| | DNTPALEPQPQGNVPYLEAQKGQFLRLLCAADSQPPATLSWVLQNRVLSSS |
| | HPWGPRPLGLELPGVKAGDSGRYTCRAENRLGSQQRALDLSVQYPPENLR |
| | VMVSQANRTVLENLGNGTSLPVLEGQSLCLVCVTHSSPPARLSWTQRGQV |
| | LSPSQPSDPGVLELPRVQVEHEGEFTCHARHPLGSQHVSLSLSVHYSPKLLG |
| | PSCSWEAEGLHCSCSSQASPAPSLRWWLGEELLEGNSSQDSFEVTPSSAGP |
| | WANSSLSLHGGLSSGLRLRCEAWNVHGAQSGSILQLPDKKGLIST |
| SEQ ID NO: 419 | DIQMTQSPSSLSASVGDRVTITCRASQDISNYLNWYQQKPGKAPKLLIYYTS |
| anti-CD73 LC | RLHSGVPSRFSGSGSGTDFTFTISSLQPEDIATYYCQQGNTLPLTFGQGTKVE |
| fused to SIRPa | IKRTVAAPSVFIFPPSDEQLKSGTASVVCLLNNFYPREAKVQWKVDNALQS |
| ECD | GNSQESVTEQDSKDSTYSLSSTLTLSKADYEKHKVYACEVTHQGLSSPVTK |
| | SFNRGECGGGGSGGGGSGGGGSEEELQVIQPDKSVLVAAGETATLRCTATS |
| | LIPVGPIQWFRGAGPGRELIYNQKEGHFPRVTTVSDLTKRNNMDFSIRIGNIT |
| | PADAGTYYCVKFRKGSPDDVEFKSGAGTELSVRAKPS |
| SEQ ID NO: 420 | DIQMTQSPSSLSASVGDRVTITCRASQDISNYLNWYQQKPGKAPKLLIYYTS |
| anti-CD73 LC | RLHSGVPSRFSGSGSGTDFTFTISSLQPEDIATYYCQQGNTLPLTFGQGTKVE |
| fused to TIM3 | IKRTVAAPSVFIFPPSDEQLKSGTASVVCLLNNFYPREAKVQWKVDNALQS |
| ECD | GNSQESVTEQDSKDSTYSLSSTLTLSKADYEKHKVYACEVTHQGLSSPVTK |
| | SFNRGECGGGGSGGGGSGGGGSSEVEYRAEVGQNAYLPCFYTPAAPGNLV |
| | PVCWGKGACPVFECGNVVLRTDERDVNYWTSRYWLNGDFRKGDVSLTIE |
| | NVTLADSGIYCCRIQIPGIMNDEKFNLKLVIKPAKVTPAPTRQRDFTAAFPR |
| | MLTTRGHGPAETQTLGSLPDINLTQISTLANELRDSRLANDLRDSGATIRIG |
| SEQ ID NO: 421 | EVQLVQSGAEVKKPGESLKISCKASGYAFSSSWINWVRQMPGKGLEWMG |
| anti-CD73 HC | RIYPRAGDTNYAGKFKDQVTISADKSISTAYLQWSSLKASDTAMYYCASLL |
| fused to PD1 ECD | DYSMDYWGQGTLVTVSSASTKGPSVFPLAPSSKSTSGGTAALGCLVKDYF |
| | PEPVTVSWNSGALTSGVHTFPAVLQSSGLYSLSSVVTVPSSSLGTQTYICNV |
| | NHKPSNTKVDKKVEPKSCDKTHTCPPCPAPELLGGPSVFLFPPKPKDTLMIS |
| | RTPEVTCVVVDVSHEDPEVKFNWYVDGVEVHNAKTKPREEQYNSTYRVV |
| | SVLTVLHQDWLNGKEYKCKVSNKALPAPIEKTISKAKGQPREPQVYTLPPS |
| | REEMTKNQVSLTCLVKGFYPSDIAVEWESNGQPENNYKTTPPVLDSDGSFF |
| | LYSKLTVDKSRWQQGNVFSCSVMHEALHNHYTQKSLSLSPGKGGGGSGG |
| | GGSGGGGSPGWFLDSPDRPWNPPTFSPALLVVTEGDNATFTCSFSNTSESFV |
| | LNWYRMSPSNQTDKLAAFPEDRSQPGQDCRFRVTQLPNGRDFHMSVVRA |
| | RRNDSGTYLCGAISLAPKAQIKESLRAELRVTERRAEVPTAHPSPSPRPAGQ |
| | FQTLV |
| SEQ ID NO: 422 | DIQMTQSPSSLSASVGDRVTITCRASQDISNYLNWYQQKPGKAPKLLIYYTS |
| anti-CD73 LC | RLHSGVPSRFSGSGSGTDFTFTISSLQPEDIATYYCQQGNTLPLTFGQGTKVE |
| fused to BTLA | IKRTVAAPSVFIFPPSDEQLKSGTASVVCLLNNFYPREAKVQWKVDNALQS |
| ECD | GNSQESVTEQDSKDSTYSLSSTLTLSKADYEKHKVYACEVTHQGLSSPVTK |
| | SFNRGECGGGGSGGGGSGGGGSKESCDVQLYIKRQSEHSILAGDPFELECP |
| | VKYCANRPHVTWCKLNGTTCVKLEDRQTSWKEEKNISFFILHFEPVLPNDN |
| | GSYRCSANFQSNLIESHSTTLYVTDVKSASERPSKDEMAS |
| SEQ ID NO: 423 | EVQLVQSGAEVKKPGESLKISCKASGYAFSSSWINWVRQMPGKGLEWMG |
| anti-CD73 HC | RIYPRAGDTNYAGKFKDQVTISADKSISTAYLQWSSLKASDTAMYYCASLL |
| fused to | DYSMDYWGQGTLVTVSSASTKGPSVFPLAPSSKSTSGGTAALGCLVKDYF |
| SIGLEC10 ECD | PEPVTVSWNSGALTSGVHTFPAVLQSSGLYSLSSVVTVPSSSLGTQTYICNV |
| | NHKPSNTKVDKKVEPKSCDKTHTCPPCPAPELLGGPSVFLFPPKPKDTLMIS |
| | RTPEVTCVVVDVSHEDPEVKFNWYVDGVEVHNAKTKPREEQYNSTYRVV |
| | SVLTVLHQDWLNGKEYKCKVSNKALPAPIEKTISKAKGQPREPQVYTLPPS |
| | REEMTKNQVSLTCLVKGFYPSDIAVEWESNGQPENNYKTTPPVLDSDGSFF |
| | LYSKLTVDKSRWQQGNVFSCSVMHEALHNHYTQKSLSLSPGKGGGGSGG |
| | GGSGGGGSMDGRFWIRVQESVMVPEGLCISVPCSFSYPRQDWTGSTPAYG |
| | YWFKAVTETTKGAPVATNHQSREVEMSTRGRFQLTGDPAKGNCSLVIRDA |
| | QMQDESQYFFRVERGSYVRYNFMNDGFFLKVTALTQKPDVYIPETLEPGQ |
| | PVTVICVFNWAFEECPPPSFSWTGAALSSQGTKPTTSHFSVLSFTPRPQDHN |
| | TDLTCHVDFSRKGVSAQRTVRLRVAYAPRDLVISISRDNTPALEPQPQGNV |
| | PYLEAQKGQFLRLLCAADSQPPATLSWVLQNRVLSSSHPWGPRPLGLELPG |
| | VKAGDSGRYTCRAENRLGSQQRALDLSVQYPPENLRVMVSQANRTVLEN |
| | LGNGTSLPVLEGQSLCLVCVTHSSPPARLSWTQRGQVLSPSQPSDPGVLELP |
| | RVQVEHEGEFTCHARHPLGSQHVSLSLSVHYSPKLLGPSCSWEAEGLHCSC |
| | SSQASPAPSLRWWLGEELLEGNSSQDSFEVTPSSAGPWANSSLSLHGGLSS |
| | GLRLRCEAWNVHGAQSGSILQLPDKKGLIST |
| SEQ ID NO: 424 | EVQLVQSGAEVKKPGESLKISCKASGYAFSSSWINWVRQMPGKGLEWMG |
| anti-CD73 HC | RIYPRAGDTNYAGKFKDQVTISADKSISTAYLQWSSLKASDTAMYYCASLL |
| fused to SIRPa | DYSMDYWGQGTLVTVSSASTKGPSVFPLAPSSKSTSGGTAALGCLVKDYF |
| ECD | PEPVTVSWNSGALTSGVHTFPAVLQSSGLYSLSSVVTVPSSSLGTQTYICNV |
| | NHKPSNTKVDKKVEPKSCDKTHTCPPCPAPELLGGPSVFLFPPKPKDTLMIS |
| | RTPEVTCVVVDVSHEDPEVKFNWYVDGVEVHNAKTKPREEQYNSTYRVV |
| | SVLTVLHQDWLNGKEYKCKVSNKALPAPIEKTISKAKGQPREPQVYTLPPS |
| | REEMTKNQVSLTCLVKGFYPSDIAVEWESNGQPENNYKTTPPVLDSDGSFF |
| | LYSKLTVDKSRWQQGNVFSCSVMHEALHNHYTQKSLSLSPGKGGGGSGG |
| | GGSGGGGSEEELQVIQPDKSVLVAAGETATLRCTATSLIPVGPIQWFRGAGP |
| | GRELIYNQKEGHFPRVTTVSDLTKRNNMDFSIRIGNITPADAGTYYCVKFR |
| | KGSPDDVEFKSGAGTELSVRAKPS |
| SEQ ID NO: 425 | EVQLVQSGAEVKKPGESLKISCKASGYAFSSSWINWVRQMPGKGLEWMG |
| anti-CD73 HC | RIYPRAGDTNYAGKFKDQVTISADKSISTAYLQWSSLKASDTAMYYCASLL |
| fused to TGFbR | DYSMDYWGQGTLVTVSSASTKGPSVFPLAPSSKSTSGGTAALGCLVKDYF |
| ECD | PEPVTVSWNSGALTSGVHIFPAVLQSSGLYSLSSVVTVPSSSLGTQTYICNV |
| | NHKPSNTKVDKKVEPKSCDKTHTCPPCPAPELLGGPSVFLFPPKPKDTLMIS |
| | RTPEVTCVVVDVSHEDPEVKFNWYVDGVEVHNAKTKPREEQYNSTYRVV |
| | SVLTVLHQDWLNGKEYKCKVSNKALPAPIEKTISKAKGQPREPQVYTLPPS |
| | REEMTKNQVSLTCLVKGFYPSDIAVEWESNGQPENNYKTTPPVLDSDGSFF |
| | LYSKLTVDKSRWQQGNVFSCSVMHEALHNHYTQKSLSLSPGKGGGGSGG |
| | GGSGGGGSTIPPHVQKSVNNDMIVTDNNGAVKFPQLCKFCDVRFSTCDNQ |
| | KSCMSNCSITSICEKPQEVCVAVWRKNDENITLETVCHDPKLPYHDFILEDA |
| | ASPKCIMKEKKKPGETFFMCSCSSDECNDNIIFSEEYNTSNPD |
| SEQ ID NO: 426 | EVQLVQSGAEVKKPGESLKISCKASGYAFSSSWINWVRQMPGKGLEWMG |
| anti-CD73 HC | RIYPRAGDTNYAGKFKDQVTISADKSISTAYLQWSSLKASDTAMYYCASLL |
| fused to TIM3 | DYSMDYWGQGTLVTVSSASTKGPSVFPLAPSSKSTSGGTAALGCLVKDYF |
| ECD | PEPVTVSWNSGALTSGVHIFPAVLQSSGLYSLSSVVTVPSSSLGTQTYICNV |
| | NHKPSNTKVDKKVEPKSCDKTHTCPPCPAPELLGGPSVFLFPPKPKDTLMIS |
| | RTPEVTCVVVDVSHEDPEVKFNWYVDGVEVHNAKTKPREEQYNSTYRVV |
| | SVLTVLHQDWLNGKEYKCKVSNKALPAPIEKTISKAKGQPREPQVYTLPPS |
| | REEMTKNQVSLTCLVKGFYPSDIAVEWESNGQPENNYKTTPPVLDSDGSFF |
| | LYSKLTVDKSRWQQGNVFSCSVMHEALHNHYTQKSLSLSPGKGGGGSGG |
| | GGSGGGGSSEVEYRAEVGQNAYLPCFYTPAAPGNLVPVCWGKGACPVFEC |
| | GNVVLRTDERDVNYWTSRYWLNGDFRKGDVSLTIENVTLADSGIYCCRIQI |
| | PGIMNDEKFNLKLVIKPAKVTPAPTRQRDFTAAFPRMLTTRGHGPAETQTL |
| | GSLPDINLTQISTLANELRDSRLANDLRDSGATIRIG |
| SEQ ID NO: 427 | EVQLVQSGAEVKKPGESLKISCKASGYAFSSSWINWVRQMPGKGLEWMG |
| anti-CD73 HC | RIYPRAGDTNYAGKFKDQVTISADKSISTAYLQWSSLKASDTAMYYCASLL |
| fused to VEGFR | DYSMDYWGQGTLVTVSSASTKGPSVFPLAPSSKSTSGGTAALGCLVKDYF |
| ECD | PEPVTVSWNSGALTSGVHTFPAVLQSSGLYSLSSVVTVPSSSLGTQTYICNV |
| | NHKPSNTKVDKKVEPKSCDKTHTCPPCPAPELLGGPSVFLFPPKPKDTLMIS |
| | RTPEVTCVVVDVSHEDPEVKFNWYVDGVEVHNAKTKPREEQYNSTYRVV |
| | SVLTVLHQDWLNGKEYKCKVSNKALPAPIEKTISKAKGQPREPQVYTLPPS |
| | REEMTKNQVSLTCLVKGFYPSDIAVEWESNGQPENNYKTTPPVLDSDGSFF |
| | LYSKLTVDKSRWQQGNVFSCSVMHEALHNHYTQKSLSLSPGKGGGGSGG |
| | GGSGGGGSSDTGRPFVEMYSEIPEIIHMTEGRELVIPCRVTSPNITVTLKKFP |
| | LDTLIPDGKRIIWDSRKGFIISNATYKEIGLLTCEATVNGHLYKTNYLTHRQT |
| | NTIIDVVLSPSHGIELSVGEKLVLNCTARTELNVGIDFNWEYPSSKHQHKKL |
| | VNRDLKTQSGSEMKKFLSTLTIDGVTRSDQGLYTCAASSGLMTKKNSTFVR |
| | VHEK |
| SEQ ID NO: 428 | QVOLVOSGSELKKPGASVKVSCKASGYTFTHYGMNWVRQAPGQGLKWM |
| anti-CD39 HC | GWINTYTGEPTYADDFKGRFVFSLDTSVSTAYLQISSLKAEDTAVYYCARR |
| fused to BTLA | RYEGNYVFYYFDYWGQGTTVTVSSASTKGPSVFPLAPSSKSTSGGTAALGC |
| ECD | LVKDYFPEPVTVSWNSGALTSGVHTFPAVLQSSGLYSLSSVVTVPSSSLGTQ |
| | TYICNVNHKPSNTKVDKKVEPKSCDKTHTCPPCPAPELLGGPSVFLFPPKPK |
| | DTLMISRTPEVTCVVVDVSHEDPEVKFNWYVDGVEVHNAKTKPREEQYNS |
| | TYRVVSVLTVLHQDWLNGKEYKCKVSNKALPAPIEKTISKAKGQPREPQV |
| | YTLPPSREEMTKNQVSLTCLVKGFYPSDIAVEWESNGQPENNYKTTPPVLD |
| | SDGSFFLYSKLTVDKSRWQQGNVFSCSVMHEALHNHYTQKSLSLSPGKGG |
| | GGSGGGGSGGGGSKESCDVQLYIKRQSEHSILAGDPFELECPVKYCANRPH |
| | VTWCKLNGTTCVKLEDRQTSWKEEKNISFFILHFEPVLPNDNGSYRCSANF |
| | QSNLIESHSTTLYVTDVKSASERPSKDEMAS |
| SEQ ID NO: 429 | QVOLVOSGSELKKPGASVKVSCKASGYTFTHYGMNWVRQAPGQGLKWM |
| anti-CD39 HC | GWINTYTGEPTYADDFKGRFVFSLDTSVSTAYLQISSLKAEDTAVYYCARR |
| fused to PD1 ECD | RYEGNYVFYYFDYWGQGTTVTVSSASTKGPSVFPLAPSSKSTSGGTAALGC |
| | LVKDYFPEPVTVSWNSGALTSGVHTFPAVLQSSGLYSLSSVVTVPSSSLGTQ |
| | TYICNVNHKPSNTKVDKKVEPKSCDKTHTCPPCPAPELLGGPSVFLFPPKPK |
| | DTLMISRTPEVTCVVVDVSHEDPEVKFNWYVDGVEVHNAKTKPREEQYNS |
| | TYRVVSVLTVLHQDWLNGKEYKCKVSNKALPAPIEKTISKAKGQPREPQV |
| | YTLPPSREEMTKNQVSLTCLVKGFYPSDIAVEWESNGQPENNYKTTPPVLD |
| | SDGSFFLYSKLTVDKSRWQQGNVFSCSVMHEALHNHYTQKSLSLSPGKGG |
| | GGSGGGGSGGGGSPGWFLDSPDRPWNPPTFSPALLVVTEGDNATFTCSFSN |
| | TSESFVLNWYRMSPSNQTDKLAAFPEDRSQPGQDCRFRVTQLPNGRDFHM |
| | SVVRARRNDSGTYLCGAISLAPKAQIKESLRAELRVTERRAEVPTAHPSPSP |
| | RPAGQFQTLV |
| SEQ ID NO: 430 | QVOLVOSGSELKKPGASVKVSCKASGYTFTHYGMNWVRQAPGQGLKWM |
| anti-CD39 HC | GWINTYTGEPTYADDFKGRFVFSLDTSVSTAYLQISSLKAEDTAVYYCARR |
| fused to | RYEGNYVFYYFDYWGQGTTVTVSSASTKGPSVFPLAPSSKSTSGGTAALGC |
| SIGLEC10 ECD | LVKDYFPEPVTVSWNSGALTSGVHTFPAVLQSSGLYSLSSVVTVPSSSLGTQ |
| | TYICNVNHKPSNTKVDKKVEPKSCDKTHTCPPCPAPELLGGPSVFLFPPKPK |
| | DTLMISRTPEVTCVVVDVSHEDPEVKFNWYVDGVEVHNAKTKPREEQYNS |
| | TYRVVSVLTVLHQDWLNGKEYKCKVSNKALPAPIEKTISKAKGQPREPQV |
| | YTLPPSREEMTKNQVSLTCLVKGFYPSDIAVEWESNGQPENNYKTTPPVLD |
| | SDGSFFLYSKLTVDKSRWQQGNVFSCSVMHEALHNHYTQKSLSLSPGKGG |
| | GGSGGGGSGGGGSMDGRFWIRVQESVMVPEGLCISVPCSFSYPRQDWTGS |
| | TPAYGYWFKAVTETTKGAPVATNHQSREVEMSTRGRFQLTGDPAKGNCSL |
| | VIRDAQMQDESQYFFRVERGSYVRYNFMNDGFFLKVTALTQKPDVYIPET |
| | LEPGQPVTVICVFNWAFEECPPPSFSWTGAALSSQGTKPTTSHFSVLSFTPRP |
| | QDHNTDLTCHVDFSRKGVSAQRTVRLRVAYAPRDLVISISRDNTPALEPQP |
| | QGNVPYLEAQKGQFLRLLCAADSQPPATLSWVLQNRVLSSSHPWGPRPLG |
| | LELPGVKAGDSGRYTCRAENRLGSQQRALDLSVQYPPENLRVMVSQANRT |
| | VLENLGNGTSLPVLEGQSLCLVCVTHSSPPARLSWTQRGQVLSPSQPSDPG |
| | VLELPRVQVEHEGEFTCHARHPLGSQHVSLSLSVHYSPKLLGPSCSWEAEG |
| | LHCSCSSQASPAPSLRWWLGEELLEGNSSQDSFEVTPSSAGPWANSSLSLH |
| | GGLSSGLRLRCEAWNVHGAQSGSILQLPDKKGLIST |
| SEQ ID NO: 431 | QVOLVOSGSELKKPGASVKVSCKASGYTFTHYGMNWVRQAPGQGLKWM |
| anti-CD39 HC | GWINTYTGEPTYADDFKGRFVFSLDTSVSTAYLQISSLKAEDTAVYYCARR |
| fused to SIRPa | RYEGNYVFYYFDYWGQGTTVTVSSASTKGPSVFPLAPSSKSTSGGTAALGC |
| ECD | LVKDYFPEPVTVSWNSGALTSGVHTFPAVLQSSGLYSLSSVVTVPSSSLGTQ |
| | TYICNVNHKPSNTKVDKKVEPKSCDKTHTCPPCPAPELLGGPSVFLFPPKPK |
| | DTLMISRTPEVTCVVVDVSHEDPEVKFNWYVDGVEVHNAKTKPREEQYNS |
| | TYRVVSVLTVLHQDWLNGKEYKCKVSNKALPAPIEKTISKAKGQPREPQV |
| | YTLPPSREEMTKNQVSLTCLVKGFYPSDIAVEWESNGQPENNYKTTPPVLD |
| | SDGSFFLYSKLTVDKSRWQQGNVFSCSVMHEALHNHYTQKSLSLSPGKGG |
| | GGSGGGGSGGGGSEEELQVIQPDKSVLVAAGETATLRCTATSLIPVGPIQW |
| | FRGAGPGRELIYNQKEGHFPRVTTVSDLTKRNNMDFSIRIGNITPADAGTYY |
| | CVKFRKGSPDDVEFKSGAGTELSVRAKPS |
| SEQ ID NO: 432 | QVOLVOSGSELKKPGASVKVSCKASGYTFTHYGMNWVRQAPGQGLKWM |
| anti-CD39 HC | GWINTYTGEPTYADDFKGRFVFSLDTSVSTAYLQISSLKAEDTAVYYCARR |
| fused to TGFbR | RYEGNYVFYYFDYWGQGTTVTVSSASTKGPSVFPLAPSSKSTSGGTAALGC |
| ECD | LVKDYFPEPVTVSWNSGALTSGVHTFPAVLQSSGLYSLSSVVTVPSSSLGTQ |
| | TYICNVNHKPSNTKVDKKVEPKSCDKTHTCPPCPAPELLGGPSVFLFPPKPK |
| | DTLMISRTPEVTCVVVDVSHEDPEVKFNWYVDGVEVHNAKTKPREEQYNS |
| | TYRVVSVLTVLHQDWLNGKEYKCKVSNKALPAPIEKTISKAKGQPREPQV |
| | YTLPPSREEMTKNQVSLTCLVKGFYPSDIAVEWESNGQPENNYKTTPPVLD |
| | SDGSFFLYSKLTVDKSRWQQGNVFSCSVMHEALHNHYTQKSLSLSPGKGG |
| | GGSGGGGSGGGGSTIPPHVQKSVNNDMIVTDNNGAVKFPQLCKFCDVRFS |
| | TCDNQKSCMSNCSITSICEKPQEVCVAVWRKNDENITLETVCHDPKLPYHD |
| | FILEDAASPKCIMKEKKKPGETFFMCSCSSDECNDNIIFSEEYNTSNPD |
| SEQ ID NO: 433 | QVOLVOSGSELKKPGASVKVSCKASGYTFTHYGMNWVRQAPGQGLKWM |
| anti-CD39 HC | GWINTYTGEPTYADDFKGRFVFSLDTSVSTAYLQISSLKAEDTAVYYCARR |
| fused to TIM3 | RYEGNYVFYYFDYWGQGTTVTVSSASTKGPSVFPLAPSSKSTSGGTAALGC |
| ECD | LVKDYFPEPVTVSWNSGALTSGVHTFPAVLQSSGLYSLSSVVTVPSSSLGTQ |
| | TYICNVNHKPSNTKVDKKVEPKSCDKTHTCPPCPAPELLGGPSVFLFPPKPK |
| | DTLMISRTPEVTCVVVDVSHEDPEVKFNWYVDGVEVHNAKTKPREEQYNS |
| | TYRVVSVLTVLHQDWLNGKEYKCKVSNKALPAPIEKTISKAKGQPREPQV |
| | YTLPPSREEMTKNQVSLTCLVKGFYPSDIAVEWESNGQPENNYKTTPPVLD |
| | SDGSFFLYSKLTVDKSRWQQGNVFSCSVMHEALHNHYTQKSLSLSPGKGG |
| | GGSGGGGSGGGGSSEVEYRAEVGQNAYLPCFYTPAAPGNLVPVCWGKGA |
| | CPVFECGNVVLRTDERDVNYWTSRYWLNGDFRKGDVSLTIENVTLADSGI |
| | YCCRIQIPGIMNDEKFNLKLVIKPAKVTPAPTRQRDFTAAFPRMLTTRGHGP |
| | AETQTLGSLPDINLTQISTLANELRDSRLANDLRDSGATIRIG |
| SEQ ID NO: 434 | QVOLVOSGSELKKPGASVKVSCKASGYTFTHYGMNWVRQAPGQGLKWM |
| anti-CD39 HC | GWINTYTGEPTYADDFKGRFVFSLDTSVSTAYLQISSLKAEDTAVYYCARR |
| fused to VEGFR | RYEGNYVFYYFDYWGQGTTVTVSSASTKGPSVFPLAPSSKSTSGGTAALGC |
| ECD | LVKDYFPEPVTVSWNSGALTSGVHTFPAVLQSSGLYSLSSVVTVPSSSLGTQ |
| | TYICNVNHKPSNTKVDKKVEPKSCDKTHTCPPCPAPELLGGPSVFLFPPKPK |
| | DTLMISRTPEVTCVVVDVSHEDPEVKFNWYVDGVEVHNAKTKPREEQYNS |
| | TYRVVSVLTVLHQDWLNGKEYKCKVSNKALPAPIEKTISKAKGQPREPQV |
| | YTLPPSREEMTKNQVSLTCLVKGFYPSDIAVEWESNGQPENNYKTTPPVLD |
| | SDGSFFLYSKLTVDKSRWQQGNVFSCSVMHEALHNHYTQKSLSLSPGKGG |
| | GGSGGGGSGGGGSSDTGRPFVEMYSEIPEIIHMTEGRELVIPCRVTSPNITVT |
| | LKKFPLDTLIPDGKRIIWDSRKGFIISNATYKEIGLLTCEATVNGHLYKTNYL |
| | THRQTNTIIDVVLSPSHGIELSVGEKLVLNCTARTELNVGIDFNWEYPSSKH |
| | QHKKLVNRDLKTQSGSEMKKFLSTLTIDGVTRSDQGLYTCAASSGLMTKK |
| | NSTFVRVHEK |
| SEQ ID NO: 435 | QVQLVESGGGVVQPGRSLRLSCAASGFTFSSYTMHWVRQAPGKGLEWVT |
| anti-CTLA4 HC | FISYDGNNKYYADSVKGRFTISRDNSKNTLYLQMNSLRAEDTAIYYCARTG |
| fused to BTLA | WLGPFDYWGQGTLVTVSSASTKGPSVFPLAPSSKSTSGGTAALGCLVKDYF |
| ECD | PEPVTVSWNSGALTSGVHTFYAVLQSSGLYSLSSVVTVPSSSLGTQTYICNV |
| | NHKPSNTKVDKRVEPKSCDKTHTCPPCPAPELLGGPSVFLFPPKPKDTLMIS |
| | RTPEVTCVVVDVSHEDPEVKFNWYVDGVEVHNAKTKPREEQYNSTYRVV |
| | SVLTVLHQDWLNGKEYKCKVSNKALPAPIEKTISKAKGQPREPQVYTLPPS |
| | RDELTKNQVSLTCLVKGFYPSDIAVEWESNGQPENNYKTTPPVLDSDGSFF |
| | LYSKLTVDKSRWQQGGGGSGGGGSGGGGSKESCDVQLYIKRQSEHSILAG |
| | DPFELECPVKYCANRPHVTWCKLNGTTCVKLEDRQTSWKEEKNISFFILHF |
| | EPVLPNDNGSYRCSANFQSNLIESHSTTLYVTDVKSASERPSKDEMAS |
| SEQ ID NO: 436 | EIVLTQSPGTLSLSPGERATLSCRASQSVGSSYLAWYQQKPGQAPRLLIYGA |
| anti-CTLA4 LC | FSRATGIPDRFSGSGSGTDFTLTISRLEPEDFAVYYCQQYGSSPWTFGQGTK |
| fused to PD1 ECD | VEIKRTVAAPSVFIFPPSDEQLKSGTASVVCLLNNFYPREAKVQWKVDNAL |
| | QSGNSQESVTEQDSKDSTYSLSSTLTLSKADYEKHKVYACEVTHQGLSSPV |
| | TKSFNRGECGGGGSGGGGSGGGGSPGWFLDSPDRPWNPPTFSPALLVVTE |
| | GDNATFTCSFSNTSESFVLNWYRMSPSNQTDKLAAFPEDRSQPGQDCRFRV |
| | TQLPNGRDFHMSVVRARRNDSGTYLCGAISLAPKAQIKESLRAELRVTERR |
| | AEVPTAHPSPSPRPAGQFQTLV |
| SEQ ID NO: 437 | EIVLTQSPGTLSLSPGERATLSCRASQSVGSSYLAWYQQKPGQAPRLLIYGA |
| anti-CTLA4 LC | FSRATGIPDRFSGSGSGTDFTLTISRLEPEDFAVYYCQQYGSSPWTFGQGTK |
| fused to | VEIKRTVAAPSVFIFPPSDEQLKSGTASVVCLLNNFYPREAKVQWKVDNAL |
| SIGLEC10 ECD | QSGNSQESVTEQDSKDSTYSLSSTLTLSKADYEKHKVYACEVTHQGLSSPV |
| | TKSFNRGECGGGGSGGGGSGGGGSMDGRFWIRVQESVMVPEGLCISVPCS |
| | FSYPRQDWTGSTPAYGYWFKAVTETTKGAPVATNHQSREVEMSTRGRFQL |
| | TGDPAKGNCSLVIRDAQMQDESQYFFRVERGSYVRYNFMNDGFFLKVTAL |
| | TQKPDVYIPETLEPGQPVTVICVFNWAFEECPPPSFSWTGAALSSQGTKPTT |
| | SHFSVLSFTPRPQDHNTDLTCHVDFSRKGVSAQRTVRLRVAYAPRDLVISIS |
| | RDNTPALEPQPQGNVPYLEAQKGQFLRLLCAADSQPPATLSWVLQNRVLS |
| | SSHPWGPRPLGLELPGVKAGDSGRYTCRAENRLGSQQRALDLSVQYPPEN |
| | LRVMVSQANRTVLENLGNGTSLPVLEGQSLCLVCVTHSSPPARLSWTQRG |
| | QVLSPSQPSDPGVLELPRVQVEHEGEFTCHARHPLGSQHVSLSLSVHYSPKL |
| | LGPSCSWEAEGLHCSCSSQASPAPSLRWWLGEELLEGNSSQDSFEVTPSSA |
| | GPWANSSLSLHGGLSSGLRLRCEAWNVHGAQSGSILQLPDKKGLIST |
| SEQ ID NO: 438 | EIVLTQSPGTLSLSPGERATLSCRASQSVGSSYLAWYQQKPGQAPRLLIYGA |
| anti-CTLA4 LC | FSRATGIPDRFSGSGSGTDFTLTISRLEPEDFAVYYCQQYGSSPWTFGQGTK |
| fused to SIRPa | VEIKRTVAAPSVFIFPPSDEQLKSGTASVVCLLNNFYPREAKVQWKVDNAL |
| ECD | QSGNSQESVTEQDSKDSTYSLSSTLTLSKADYEKHKVYACEVTHQGLSSPV |
| | TKSFNRGECGGGGSGGGGSGGGGSEEELQVIQPDKSVLVAAGETATLRCT |
| | ATSLIPVGPIQWFRGAGPGRELIYNQKEGHFPRVTTVSDLTKRNNMDFSIRI |
| | GNITPADAGTYYCVKFRKGSPDDVEFKSGAGTELSVRAKPS |
| SEQ ID NO: 439 | EIVLTQSPGTLSLSPGERATLSCRASQSVGSSYLAWYQQKPGQAPRLLIYGA |
| anti-CTLA4 LC | FSRATGIPDRFSGSGSGTDFTLTISRLEPEDFAVYYCQQYGSSPWTFGQGTK |
| fused to TIM3 | VEIKRTVAAPSVFIFPPSDEQLKSGTASVVCLLNNFYPREAKVQWKVDNAL |
| ECD | QSGNSQESVTEQDSKDSTYSLSSTLTLSKADYEKHKVYACEVTHQGLSSPV |
| | TKSFNRGECGGGGSGGGGSGGGGSSEVEYRAEVGQNAYLPCFYTPAAPGN |
| | LVPVCWGKGACPVFECGNVVLRTDERDVNYWTSRYWLNGDFRKGDVSL |
| | TIENVTLADSGIYCCRIQIPGIMNDEKFNLKLVIKPAKVTPAPTRQRDFTAAF |
| | PRMLTTRGHGPAETQTLGSLPDINLTQISTLANELRDSRLANDLRDSGATIRI |
| | G |
| SEQ ID NO: 440 | QVQLVESGGGVVQPGRSLRLSCAASGFTFSSYTMHWVRQAPGKGLEWVT |
| anti-CTLA4 HC | FISYDGNNKYYADSVKGRFTISRDNSKNTLYLQMNSLRAEDTAIYYCARTG |
| fused to PD1 ECD | WLGPFDYWGQGTLVTVSSASTKGPSVFPLAPSSKSTSGGTAALGCLVKDYF |
| | PEPVTVSWNSGALTSGVHTFPAVLQSSGLYSLSSVVTVPSSSLGTQTYICNV |
| | NHKPSNTKVDKRVEPKSCDKTHTCPPCPAPELLGGPSVFLFPPKPKDTLMIS |
| | RTPEVTCVVVDVSHEDPEVKFNWYVDGVEVHNAKTKPREEQYNSTYRVV |
| | SVLTVLHQDWLNGKEYKCKVSNKALPAPIEKTISKAKGQPREPQVYTLPPS |
| | RDELTKNQVSLTCLVKGFYPSDIAVEWESNGQPENNYKTTPPVLDSDGSFF |
| | LYSKLTVDKSRWQQGGGGSGGGGSGGGGSPGWFLDSPDRPWNPPTFSPAL |
| | LVVTEGDNATFTCSFSNTSESFVLNWYRMSPSNQTDKLAAFPEDRSQPGQD |
| | CRFRVTQLPNGRDFHMSVVRARRNDSGTYLCGAISLAPKAQIKESLRAELR |
| | VTERRAEVPTAHPSPSPRPAGQFQTLV |
| SEQ ID NO: 441 | EIVLTQSPGTLSLSPGERATLSCRASQSVGSSYLAWYQQKPGQAPRLLIYGA |
| anti-CTLA4 LC | FSRATGIPDRFSGSGSGTDFTLTISRLEPEDFAVYYCQQYGSSPWTFGQGTK |
| fused to BTLA | VEIKRTVAAPSVFIFPPSDEQLKSGTASVVCLLNNFYPREAKVQWKVDNAL |
| ECD | QSGNSQESVTEQDSKDSTYSLSSTLTLSKADYEKHKVYACEVTHQGLSSPV |
| | TKSFNRGECGGGGSGGGGSGGGGSKESCDVQLYIKRQSEHSILAGDPFELE |
| | CPVKYCANRPHVTWCKLNGTTCVKLEDRQTSWKEEKNISFFILHFEPVLPN |
| | DNGSYRCSANFQSNLIESHSTTLYVTDVKSASERPSKDEMAS |
| SEQ ID NO: 442 | QVQLVESGGGVVQPGRSLRLSCAASGFTFSSYTMHWVRQAPGKGLEWVT |
| anti-CTLA4 HC | FISYDGNNKYYADSVKGRFTISRDNSKNTLYLQMNSLRAEDTAIYYCARTG |
| fused to | WLGPFDYWGQGTLVTVSSASTKGPSVFPLAPSSKSTSGGTAALGCLVKDYF |
| SIGLEC10 ECD | PEPVTVSWNSGALTSGVHTFPAVLQSSGLYSLSSVVTVPSSSLGTQTYICNV |
| | NHKPSNTKVDKRVEPKSCDKTHTCPPCPAPELLGGPSVFLFPPKPKDTLMIS |
| | RTPEVTCVVVDVSHEDPEVKFNWYVDGVEVHNAKTKPREEQYNSTYRVV |
| | SVLTVLHQDWLNGKEYKCKVSNKALPAPIEKTISKAKGQPREPQVYTLPPS |
| | RDELTKNQVSLTCLVKGFYPSDIAVEWESNGQPENNYKTTPPVLDSDGSFF |
| | LYSKLTVDKSRWQQGGGGSGGGGSGGGGSMDGRFWIRVQESVMVPEGLC |
| | ISVPCSFSYPRQDWTGSTPAYGYWFKAVTETTKGAPVATNHQSREVEMST |
| | RGRFQLTGDPAKGNCSLVIRDAQMQDESQYFFRVERGSYVRYNFMNDGFF |
| | LKVTALTQKPDVYIPETLEPGQPVTVICVFNWAFEECPPPSFSWTGAALSSQ |
| | GTKPTTSHFSVLSFTPRPQDHNTDLTCHVDFSRKGVSAQRTVRLRVAYAPR |
| | DLVISISRDNTPALEPQPQGNVPYLEAQKGQFLRLLCAADSQPPATLSWVL |
| | QNRVLSSSHPWGPRPLGLELPGVKAGDSGRYTCRAENRLGSQQRALDLSV |
| | QYPPENLRVMVSQANRTVLENLGNGTSLPVLEGQSLCLVCVTHSSPPARLS |
| | WTQRGQVLSPSQPSDPGVLELPRVQVEHEGEFTCHARHPLGSQHVSLSLSV |
| | HYSPKLLGPSCSWEAEGLHCSCSSQASPAPSLRWWLGEELLEGNSSQDSFE |
| | VTPSSAGPWANSSLSLHGGLSSGLRLRCEAWNVHGAQSGSILQLPDKKGLI |
| | ST |
| SEQ ID NO: 443 | QVQLVESGGGVVQPGRSLRLSCAASGFTFSSYTMHWVRQAPGKGLEWVT |
| anti-CTLA4 HC | FISYDGNNKYYADSVKGRFTISRDNSKNTLYLQMNSLRAEDTAIYYCARTG |
| fused to SIRPa | WLGPFDYWGQGTLVTVSSASTKGPSVFPLAPSSKSTSGGTAALGCLVKDYF |
| ECD | PEPVTVSWNSGALTSGVHTFPAVLQSSGLYSLSSVVTVPSSSLGTQTYICNV |
| | NHKPSNTKVDKRVEPKSCDKTHTCPPCPAPELLGGPSVFLFPPKPKDTLMIS |
| | RTPEVTCVVVDVSHEDPEVKFNWYVDGVEVHNAKTKPREEQYNSTYRVV |
| | SVLTVLHQDWLNGKEYKCKVSNKALPAPIEKTISKAKGQPREPQVYTLPPS |
| | RDELTKNQVSLTCLVKGFYPSDIAVEWESNGQPENNYKTTPPVLDSDGSFF |
| | LYSKLTVDKSRWQQGGGGSGGGGSGGGGSEEELQVIQPDKSVLVAAGETA |
| | TLRCTATSLIPVGPIQWFRGAGPGRELIYNQKEGHFPRVTTVSDLTKRNNM |
| | DFSIRIGNITPADAGTYYCVKFRKGSPDDVEFKSGAGTELSVRAKPS |
| SEQ ID NO: 444 | QVQLVESGGGVVQPGRSLRLSCAASGFTFSSYTMHWVRQAPGKGLEWVT |
| anti-CTLA4 HC | FISYDGNNKYYADSVKGRFTISRDNSKNTLYLQMNSLRAEDTAIYYCARTG |
| fused to TGFbR | WLGPFDYWGQGTLVTVSSASTKGPSVFPLAPSSKSTSGGTAALGCLVKDYF |
| ECD | PEPVTVSWNSGALTSGVHTFPAVLQSSGLYSLSSVVTVPSSSLGTQTYICNV |
| | NHKPSNTKVDKRVEPKSCDKTHTCPPCPAPELLGGPSVFLFPPKPKDTLMIS |
| | RTPEVTCVVVDVSHEDPEVKFNWYVDGVEVHNAKTKPREEQYNSTYRVV |
| | SVLTVLHQDWLNGKEYKCKVSNKALPAPIEKTISKAKGQPREPQVYTLPPS |
| | RDELTKNQVSLTCLVKGFYPSDIAVEWESNGQPENNYKTTPPVLDSDGSFF |
| | LYSKLTVDKSRWQQGGGGSGGGGSGGGGSTIPPHVQKSVNNDMIVTDNN |
| | GAVKFPQLCKFCDVRFSTCDNQKSCMSNCSITSICEKPQEVCVAVWRKNDE |
| | NITLETVCHDPKLPYHDFILEDAASPKCIMKEKKKPGETFFMCSCSSDECND |
| | NIIFSEEYNTSNPD |
| SEQ ID NO: 445 | QVQLVESGGGVVQPGRSLRLSCAASGFTFSSYTMHWVRQAPGKGLEWVT |
| anti-CTLA4 HC | FISYDGNNKYYADSVKGRFTISRDNSKNTLYLQMNSLRAEDTAIYYCARTG |
| fused to TIM3 | WLGPFDYWGQGTLVTVSSASTKGPSVFPLAPSSKSTSGGTAALGCLVKDYF |
| ECD | PEPVTVSWNSGALTSGVHTFPAVLQSSGLYSLSSVVTVPSSSLGTQTYICNV |
| | NHKPSNTKVDKRVEPKSCDKTHTCPPCPAPELLGGPSVFLFPPKPKDTLMIS |
| | RTPEVTCVVVDVSHEDPEVKFNWYVDGVEVHNAKTKPREEQYNSTYRVV |
| | SVLTVLHQDWLNGKEYKCKVSNKALPAPIEKTISKAKGQPREPQVYTLPPS |
| | RDELTKNQVSLTCLVKGFYPSDIAVEWESNGQPENNYKTTPPVLDSDGSFF |
| | LYSKLTVDKSRWQQGGGGSGGGGSGGGGSSEVEYRAEVGQNAYLPCFYT |
| | PAAPGNLVPVCWGKGACPVFECGNVVLRTDERDVNYWTSRYWLNGDFR |
| | KGDVSLTIENVTLADSGIYCCRIQIPGIMNDEKFNLKLVIKPAKVTPAPTRQR |
| | DFTAAFPRMLTTRGHGPAETQTLGSLPDINLTQISTLANELRDSRLANDLRD |
| | SGATIRIG |
| SEQ ID NO: 446 | QVQLVESGGGVVQPGRSLRLSCAASGFTFSSYTMHWVRQAPGKGLEWVT |
| anti-CTLA4 HC | FISYDGNNKYYADSVKGRFTISRDNSKNTLYLQMNSLRAEDTAIYYCARTG |
| fused to VEGFR | WLGPFDYWGQGTLVTVSSASTKGPSVFPLAPSSKSTSGGTAALGCLVKDYF |
| ECD | PEPVTVSWNSGALTSGVHTFPAVLQSSGLYSLSSVVTVPSSSLGTQTYICNV |
| | NHKPSNTKVDKRVEPKSCDKTHTCPPCPAPELLGGPSVFLFPPKPKDTLMIS |
| | RTPEVTCVVVDVSHEDPEVKFNWYVDGVEVHNAKTKPREEQYNSTYRVV |
| | SVLTVLHQDWLNGKEYKCKVSNKALPAPIEKTISKAKGQPREPQVYTLPPS |
| | RDELTKNQVSLTCLVKGFYPSDIAVEWESNGQPENNYKTTPPVLDSDGSFF |
| | LYSKLTVDKSRWQQGGGGSGGGGSGGGGSSDTGRPFVEMYSEIPEIIHMTE |
| | GRELVIPCRVTSPNITVTLKKFPLDTLIPDGKRIIWDSRKGFIISNATYKEIGLL |
| | TCEATVNGHLYKTNYLTHRQTNTIIDVVLSPSHGIELSVGEKLVLNCTARTE |
| | LNVGIDFNWEYPSSKHQHKKLVNRDLKTQSGSEMKKFLSTLTIDGVTRSDQ |
| | GLYTCAASSGLMTKKNSTFVRVHEK |
| SEQ ID NO: 447 | QVQLVQSGVEVKKPGASVKVSCKASGYTFTNYYMYWVRQAPGQGLEWM |
| anti-PD1 HC | GGINPSNGGTNFNEKFKNRVTLTTDSSTTTAYMELKSLQFDDTAVYYCARR |
| fused to BTLA | DYRFDMGFDYWGQGTTVTVSSASTKGPSVFPLAPCSRSTSESTAALGCLVK |
| ECD | DYFPEPVTVSWNSGALTSGVHTFPAVLQSSGLYSLSSVVTVPSSSLGTKTYT |
| | CNVDHKPSNTKVDKRVESKYGPPCPPCPAPEFLGGPSVFLFPPKPKDTLMIS |
| | RTPEVTCVVVDVSQEDPEVQFNWYVDGVEVHNAKTKPREEQFNSTYRVV |
| | SVLTVLHQDWLNGKEYKCKVSNKGLPSSIEKTISKAKGQPREPQVYTLPPS |
| | QEEMTKNQVSLTCLVKGFYPSDIAVEWESNGQPENNYKTTPPVLDSDGSFF |
| | LYSRLTVDKSRWQEGNVFSCSVMHEALHNHYTQKSLSLSLGKGGGGSGG |
| | GGSGGGGSKESCDVQLYIKRQSEHSILAGDPFELECPVKYCANRPHVTWCK |
| | LNGTTCVKLEDRQTSWKEEKNISFFILHEEPVLPNDNGSYRCSANFQSNLIE |
| | SHSTTLYVTDVKSASERPSKDEMAS |
| SEQ ID NO: 448 | EIVLTQSPATLSLSPGERATLSCRASKGVSTSGYSYLHWYQQKPGQAPRLLI |
| anti-PD1 LC | YLASYLESGVPARFSGSGSGTDFTLTISSLEPEDFAVYYCQHSRDLPLTFGG |
| fused to PD1 ECD | GTKVEIKRTVAAPSVFIFPPSDEQLKSGTASVVCLLNNFYPREAKVQWKVD |
| | NALQSGNSQESVTEQDSKDSTYSLSSTLTLSKADYEKHKVYACEVTHQGLS |
| | SPVTKSFNRGECGGGGSGGGGSGGGGSPGWFLDSPDRPWNPPTFSPALLVV |
| | TEGDNATFTCSFSNTSESFVLNWYRMSPSNQTDKLAAFPEDRSQPGQDCRF |
| | RVTQLPNGRDFHMSVVRARRNDSGTYLCGAISLAPKAQIKESLRAELRVTE |
| | RRAEVPTAHPSPSPRPAGQFQTLV |
| SEQ ID NO: 449 | EIVLTQSPATLSLSPGERATLSCRASKGVSTSGYSYLHWYQQKPGQAPRLLI |
| anti-PD1 LC | YLASYLESGVPARFSGSGSGTDFTLTISSLEPEDFAVYYCQHSRDLPLTFGG |
| fused to | GTKVEIKRTVAAPSVFIFPPSDEQLKSGTASVVCLLNNFYPREAKVQWKVD |
| SIGLEC10 ECD | NALQSGNSQESVTEQDSKDSTYSLSSTLTLSKADYEKHKVYACEVTHQGLS |
| | SPVTKSFNRGECGGGGSGGGGSGGGGSMDGRFWIRVQESVMVPEGLCISV |
| | PCSFSYPRQDWTGSTPAYGYWFKAVTETTKGAPVATNHQSREVEMSTRGR |
| | FQLTGDPAKGNCSLVIRDAQMQDESQYFFRVERGSYVRYNFMNDGFFLKV |
| | TALTQKPDVYIPETLEPGQPVTVICVFNWAFEECPPPSFSWTGAALSSQGTK |
| | PTTSHFSVLSFTPRPQDHNTDLTCHVDFSRKGVSAQRTVRLRVAYAPRDLV |
| | ISISRDNTPALEPQPQGNVPYLEAQKGQFLRLLCAADSQPPATLSWVLQNR |
| | VLSSSHPWGPRPLGLELPGVKAGDSGRYTCRAENRLGSQQRALDLSVQYPP |
| | ENLRVMVSQANRTVLENLGNGTSLPVLEGQSLCLVCVTHSSPPARLSWTQ |
| | RGQVLSPSQPSDPGVLELPRVQVEHEGEFTCHARHPLGSQHVSLSLSVHYSP |
| | KLLGPSCSWEAEGLHCSCSSQASPAPSLRWWLGEELLEGNSSQDSFEVTPSS |
| | AGPWANSSLSLHGGLSSGLRLRCEAWNVHGAQSGSILQLPDKKGLIST |
| SEQ ID NO: 450 | EIVLTQSPATLSLSPGERATLSCRASKGVSTSGYSYLHWYQQKPGQAPRLLI |
| anti-PD1 LC | YLASYLESGVPARFSGSGSGTDFTLTISSLEPEDFAVYYCQHSRDLPLTFGG |
| fused to SIRPa | GTKVEIKRTVAAPSVFIFPPSDEQLKSGTASVVCLLNNFYPREAKVQWKVD |
| ECD | NALQSGNSQESVTEQDSKDSTYSLSSTLTLSKADYEKHKVYACEVTHQGLS |
| | SPVTKSFNRGECGGGGSGGGGSGGGGSEEELQVIQPDKSVLVAAGETATLR |
| | CTATSLIPVGPIQWFRGAGPGRELIYNQKEGHFPRVTTVSDLTKRNNMDFSI |
| | RIGNITPADAGTYYCVKFRKGSPDDVEFKSGAGTELSVRAKPS |
| SEQ ID NO: 451 | EIVLTQSPATLSLSPGERATLSCRASKGVSTSGYSYLHWYQQKPGQAPRLLI |
| anti-PD1 LC | YLASYLESGVPARFSGSGSGTDFTLTISSLEPEDFAVYYCQHSRDLPLTFGG |
| fused to TIM3 | GTKVEIKRTVAAPSVFIFPPSDEQLKSGTASVVCLLNNFYPREAKVQWKVD |
| ECD | NALQSGNSQESVTEQDSKDSTYSLSSTLTLSKADYEKHKVYACEVTHQGLS |
| | SPVTKSFNRGECGGGGSGGGGSGGGGSSEVEYRAEVGQNAYLPCFYTPAA |
| | PGNLVPVCWGKGACPVFECGNVVLRTDERDVNYWTSRYWLNGDFRKGD |
| | VSLTIENVTLADSGIYCCRIQIPGIMNDEKFNLKLVIKPAKVTPAPTRQRDFT |
| | AAFPRMLTTRGHGPAETQTLGSLPDINLTQISTLANELRDSRLANDLRDSGA |
| | TIRIG |
| SEQ ID NO: 452 | QVQLVQSGVEVKKPGASVKVSCKASGYTFTNYYMYWVRQAPGQGLEWM |
| anti-PD1 HC | GGINPSNGGTNFNEKFKNRVTLTTDSSTTTAYMELKSLQFDDTAVYYCARR |
| fused to PD1 ECD | DYRFDMGFDYWGQGTTVTVSSASTKGPSVFPLAPCSRSTSESTAALGCLVK |
| | DYFPEPVTVSWNSGALTSGVHTFPAVLQSSGLYSLSSVVTVPSSSLGTKTYT |
| | CNVDHKPSNTKVDKRVESKYGPPCPPCPAPEFLGGPSVFLFPPKPKDTLMIS |
| | RTPEVTCVVVDVSQEDPEVQFNWYVDGVEVHNAKTKPREEQFNSTYRVV |
| | SVLTVLHQDWLNGKEYKCKVSNKGLPSSIEKTISKAKGQPREPQVYTLPPS |
| | QEEMTKNQVSLTCLVKGFYPSDIAVEWESNGQPENNYKTTPPVLDSDGSFF |
| | LYSRLTVDKSRWQEGNVFSCSVMHEALHNHYTQKSLSLSLGKGGGGSGG |
| | GGSGGGGSPGWFLDSPDRPWNPPTFSPALLVVTEGDNATFTCSFSNTSESFV |
| | LNWYRMSPSNQTDKLAAFPEDRSQPGQDCRFRVTQLPNGRDFHMSVVRA |
| | RRNDSGTYLCGAISLAPKAQIKESLRAELRVTERRAEVPTAHPSPSPRPAGQ |
| | FQTLV |
| SEQ ID NO: 453 | EIVLTQSPATLSLSPGERATLSCRASKGVSTSGYSYLHWYQQKPGQAPRLLI |
| anti-PD1 LC | YLASYLESGVPARFSGSGSGTDFTLTISSLEPEDFAVYYCQHSRDLPLTFGG |
| fused to BTLA | GTKVEIKRTVAAPSVFIFPPSDEQLKSGTASVVCLLNNFYPREAKVQWKVD |
| ECD | NALQSGNSQESVTEQDSKDSTYSLSSTLTLSKADYEKHKVYACEVTHQGLS |
| | SPVTKSFNRGECGGGGSGGGGSGGGGSKESCDVQLYIKRQSEHSILAGDPF |
| | ELECPVKYCANRPHVTWCKLNGTTCVKLEDRQTSWKEEKNISFFILHEEPV |
| | LPNDNGSYRCSANFQSNLIESHSTTLYVTDVKSASERPSKDEMAS |
| SEQ ID NO: 454 | QVQLVQSGVEVKKPGASVKVSCKASGYTFTNYYMYWVRQAPGQGLEWM |
| anti-PD1 HC | GGINPSNGGTNFNEKFKNRVTLTTDSSTTTAYMELKSLQFDDTAVYYCARR |
| fused to | DYRFDMGFDYWGQGTTVTVSSASTKGPSVFPLAPCSRSTSESTAALGCLVK |
| SIGLEC10 ECD | DYFPEPVTVSWNSGALTSGVHTFPAVLQSSGLYSLSSVVTVPSSSLGTKTYT |
| | CNVDHKPSNTKVDKRVESKYGPPCPPCPAPEFLGGPSVFLFPPKPKDTLMIS |
| | RTPEVTCVVVDVSQEDPEVQFNWYVDGVEVHNAKTKPREEQFNSTYRVV |
| | SVLTVLHQDWLNGKEYKCKVSNKGLPSSIEKTISKAKGQPREPQVYTLPPS |
| | QEEMTKNQVSLTCLVKGFYPSDIAVEWESNGQPENNYKTTPPVLDSDGSFF |
| | LYSRLTVDKSRWQEGNVFSCSVMHEALHNHYTQKSLSLSLGKGGGGSGG |
| | GGSGGGGSMDGRFWIRVQESVMVPEGLCISVPCSFSYPRQDWTGSTPAYG |
| | YWFKAVTETTKGAPVATNHQSREVEMSTRGRFQLTGDPAKGNCSLVIRDA |
| | QMQDESQYFFRVERGSYVRYNFMNDGFFLKVTALTQKPDVYIPETLEPGQ |
| | PVTVICVFNWAFEECPPPSFSWTGAALSSQGTKPTTSHFSVLSFTPRPQDHN |
| | TDLTCHVDFSRKGVSAQRTVRLRVAYAPRDLVISISRDNTPALEPQPQGNV |
| | PYLEAQKGQFLRLLCAADSQPPATLSWVLQNRVLSSSHPWGPRPLGLELPG |
| | VKAGDSGRYTCRAENRLGSQQRALDLSVQYPPENLRVMVSQANRTVLEN |
| | LGNGTSLPVLEGQSLCLVCVTHSSPPARLSWTQRGQVLSPSQPSDPGVLELP |
| | RVQVEHEGEFTCHARHPLGSQHVSLSLSVHYSPKLLGPSCSWEAEGLHCSC |
| | SSQASPAPSLRWWLGEELLEGNSSQDSFEVTPSSAGPWANSSLSLHGGLSS |
| | GLRLRCEAWNVHGAQSGSILQLPDKKGLIST |
| SEQ ID NO: 455 | QVQLVQSGVEVKKPGASVKVSCKASGYTFTNYYMYWVRQAPGQGLEWM |
| anti-PD1 HC | GGINPSNGGTNFNEKFKNRVTLTTDSSTTTAYMELKSLQFDDTAVYYCARR |
| fused to SIRPa | DYRFDMGFDYWGQGTTVTVSSASTKGPSVFPLAPCSRSTSESTAALGCLVK |
| ECD | DYFPEPVTVSWNSGALTSGVHTFPAVLQSSGLYSLSSVVTVPSSSLGTKTYT |
| | CNVDHKPSNTKVDKRVESKYGPPCPPCPAPEFLGGPSVFLFPPKPKDTLMIS |
| | RTPEVTCVVVDVSQEDPEVQFNWYVDGVEVHNAKTKPREEQFNSTYRVV |
| | SVLTVLHQDWLNGKEYKCKVSNKGLPSSIEKTISKAKGQPREPQVYTLPPS |
| | QEEMTKNQVSLTCLVKGFYPSDIAVEWESNGQPENNYKTTPPVLDSDGSFF |
| | LYSRLTVDKSRWQEGNVFSCSVMHEALHNHYTQKSLSLSLGKGGGGSGG |
| | GGSGGGGSEEELQVIQPDKSVLVAAGETATLRCTATSLIPVGPIQWFRGAGP |
| | GRELIYNQKEGHFPRVTTVSDLTKRNNMDFSIRIGNITPADAGTYYCVKFR |
| | KGSPDDVEFKSGAGTELSVRAKPS |
| SEQ ID NO: 456 | QVQLVQSGVEVKKPGASVKVSCKASGYTFTNYYMYWVRQAPGQGLEWM |
| anti-PD1 HC | GGINPSNGGTNFNEKFKNRVTLTTDSSTTTAYMELKSLQFDDTAVYYCARR |
| fused to TGFbR | DYRFDMGFDYWGQGTTVTVSSASTKGPSVFPLAPCSRSTSESTAALGCLVK |
| ECD | DYFPEPVTVSWNSGALTSGVHTFPAVLQSSGLYSLSSVVTVPSSSLGTKTYT |
| | CNVDHKPSNTKVDKRVESKYGPPCPPCPAPEFLGGPSVFLFPPKPKDTLMIS |
| | RTPEVTCVVVDVSQEDPEVQFNWYVDGVEVHNAKTKPREEQFNSTYRVV |
| | SVLTVLHQDWLNGKEYKCKVSNKGLPSSIEKTISKAKGQPREPQVYTLPPS |
| | QEEMTKNQVSLTCLVKGFYPSDIAVEWESNGQPENNYKTTPPVLDSDGSFF |
| | LYSRLTVDKSRWQEGNVFSCSVMHEALHNHYTQKSLSLSLGKGGGGSGG |
| | GGSGGGGSTIPPHVQKSVNNDMIVTDNNGAVKFPQLCKFCDVRFSTCDNQ |
| | KSCMSNCSITSICEKPQEVCVAVWRKNDENITLETVCHDPKLPYHDFILEDA |
| | ASPKCIMKEKKKPGETFFMCSCSSDECNDNIIFSEEYNTSNPD |
| SEQ ID NO: 457 | QVQLVQSGVEVKKPGASVKVSCKASGYTFTNYYMYWVRQAPGQGLEWM |
| anti-PD1 HC | GGINPSNGGTNFNEKFKNRVTLTTDSSTTTAYMELKSLQFDDTAVYYCARR |
| fused to TIM3 | DYRFDMGFDYWGQGTTVTVSSASTKGPSVFPLAPCSRSTSESTAALGCLVK |
| ECD | DYFPEPVTVSWNSGALTSGVHTFPAVLQSSGLYSLSSVVTVPSSSLGTKTYT |
| | CNVDHKPSNTKVDKRVESKYGPPCPPCPAPEFLGGPSVFLFPPKPKDTLMIS |
| | RTPEVTCVVVDVSQEDPEVQFNWYVDGVEVHNAKTKPREEQFNSTYRVV |
| | SVLTVLHQDWLNGKEYKCKVSNKGLPSSIEKTISKAKGQPREPQVYTLPPS |
| | QEEMTKNQVSLTCLVKGFYPSDIAVEWESNGQPENNYKTTPPVLDSDGSFF |
| | LYSRLTVDKSRWQEGNVFSCSVMHEALHNHYTQKSLSLSLGKGGGGSGG |
| | GGSGGGGSSEVEYRAEVGQNAYLPCFYTPAAPGNLVPVCWGKGACPVFEC |
| | GNVVLRTDERDVNYWTSRYWLNGDFRKGDVSLTIENVTLADSGIYCCRIQI |
| | PGIMNDEKFNLKLVIKPAKVTPAPTRQRDFTAAFPRMLTTRGHGPAETQTL |
| | GSLPDINLTQISTLANELRDSRLANDLRDSGATIRIG |
| SEQ ID NO: 458 | QVQLVQSGVEVKKPGASVKVSCKASGYTFTNYYMYWVRQAPGQGLEWM |
| anti-PD1 HC | GGINPSNGGTNFNEKFKNRVTLTTDSSTTTAYMELKSLQFDDTAVYYCARR |
| fused to VEGFR | DYRFDMGFDYWGQGTTVTVSSASTKGPSVFPLAPCSRSTSESTAALGCLVK |
| ECD | DYFPEPVTVSWNSGALTSGVHTFPAVLQSSGLYSLSSVVTVPSSSLGTKTYT |
| | CNVDHKPSNTKVDKRVESKYGPPCPPCPAPEFLGGPSVFLFPPKPKDTLMIS |
| | RTPEVTCVVVDVSQEDPEVQFNWYVDGVEVHNAKTKPREEQFNSTYRVV |
| | SVLTVLHQDWLNGKEYKCKVSNKGLPSSIEKTISKAKGQPREPQVYTLPPS |
| | QEEMTKNQVSLTCLVKGFYPSDIAVEWESNGQPENNYKTTPPVLDSDGSFF |
| | LYSRLTVDKSRWQEGNVFSCSVMHEALHNHYTQKSLSLSLGKGGGGSGG |
| | GGSGGGGSSDTGRPFVEMYSEIPEIIHMTEGRELVIPCRVTSPNITVTLKKFP |
| | LDTLIPDGKRIIWDSRKGFIISNATYKEIGLLTCEATVNGHLYKTNYLTHRQT |
| | NTIIDVVLSPSHGIELSVGEKLVLNCTARTELNVGIDFNWEYPSSKHQHKKL |
| | VNRDLKTQSGSEMKKFLSTLTIDGVTRSDQGLYTCAASSGLMTKKNSTFVR |
| | VHEK |
| SEQ ID NO: 459 | EVQLVESGGGLVQPGGSLRLSCAASGFTFSDSWIHWVRQAPGKGLEWVA |
| anti-PDL1 HC | WISPYGGSTYYADSVKGRFTISADTSKNTAYLQMNSLRAEDTAVYYCARR |
| fused to BTLA | HWPGGFDYWGQGTLVTVSAASTKGPSVFPLAPSSKSTSGGTAALGCLVKD |
| ECD | YFPEPVTVSWNSGALTSGVHTFPAVLQSSGLYSLSSVVTVPSSSLGTQTYIC |
| | NVNHKPSNTKVDKKVEPKSCDKTHTCPPCPAPELLGGPSVFLFPPKPKDTL |
| | MISRTPEVTCVVVDVSHEDPEVKFNWYVDGVEVHNAKTKPREEQYASTYR |
| | VVSVLTVLHQDWLNGKEYKCKVSNKALPAPIEKTISKAKGQPREPQVYTLP |
| | PSREEMTKNQVSLTCLVKGFYPSDIAVEWESNGQPENNYKTTPPVLDSDGS |
| | FFLYSKLTVDKSRWQQGNVFSCSVMHEALHNHYTQKSLSLSPGKGGGGSG |
| | GGGSGGGGSKESCDVQLYIKRQSEHSILAGDPFELECPVKYCANRPHVTWC |
| | KLNGTTCVKLEDRQTSWKEEKNISFFILHFEPVLPNDNGSYRCSANFQSNLI |
| | ESHSTTLYVTDVKSASERPSKDEMAS |
| SEQ ID NO: 460 | DIQMTQSPSSLSASVGDRVTITCRASQDVSTAVAWYQQKPGKAPKLLIYSA |
| anti-PDL1 LC | SFLYSGVPSRFSGSGSGTDFTLTISSLQPEDFATYYCQQYLYHPATFGQGTK |
| fused to | VEIKRTVAAPSVFIFPPSDEQLKSGTASVVCLLNNFYPREAKVQWKVDNAL |
| SIGLEC10 ECD | QSGNSQESVTEQDSKDSTYSLSSTLTLSKADYEKHKVYACEVTHQGLSSPV |
| | TKSFNRGECGGGGSGGGGSGGGGSMDGRFWIRVQESVMVPEGLCISVPCS |
| | FSYPRQDWTGSTPAYGYWFKAVTETTKGAPVATNHQSREVEMSTRGRFQL |
| | TGDPAKGNCSLVIRDAQMQDESQYFFRVERGSYVRYNFMNDGFFLKVTAL |
| | TQKPDVYIPETLEPGQPVTVICVFNWAFEECPPPSFSWTGAALSSQGTKPTT |
| | SHFSVLSFTPRPQDHNTDLTCHVDFSRKGVSAQRTVRLRVAYAPRDLVISIS |
| | RDNTPALEPQPQGNVPYLEAQKGQFLRLLCAADSQPPATLSWVLQNRVLS |
| | SSHPWGPRPLGLELPGVKAGDSGRYTCRAENRLGSQQRALDLSVQYPPEN |
| | LRVMVSQANRTVLENLGNGTSLPVLEGQSLCLVCVTHSSPPARLSWTQRG |
| | QVLSPSQPSDPGVLELPRVQVEHEGEFTCHARHPLGSQHVSLSLSVHYSPKL |
| | LGPSCSWEAEGLHCSCSSQASPAPSLRWWLGEELLEGNSSQDSFEVTPSSA |
| | GPWANSSLSLHGGLSSGLRLRCEAWNVHGAQSGSILQLPDKKGLIST |
| SEQ ID NO: 461 | DIQMTQSPSSLSASVGDRVTITCRASQDVSTAVAWYQQKPGKAPKLLIYSA |
| anti-PDL1 LC | SFLYSGVPSRFSGSGSGTDFTLTISSLQPEDFATYYCQQYLYHPATFGQGTK |
| fused to SIRPa | VEIKRTVAAPSVFIFPPSDEQLKSGTASVVCLLNNFYPREAKVQWKVDNAL |
| ECD | QSGNSQESVTEQDSKDSTYSLSSTLTLSKADYEKHKVYACEVTHQGLSSPV |
| | TKSFNRGECGGGGSGGGGSGGGGSEEELQVIQPDKSVLVAAGETATLRCT |
| | ATSLIPVGPIQWFRGAGPGRELIYNQKEGHFPRVTTVSDLTKRNNMDFSIRI |
| | GNITPADAGTYYCVKFRKGSPDDVEFKSGAGTELSVRAKPS |
| SEQ ID NO: 462 | DIQMTQSPSSLSASVGDRVTITCRASQDVSTAVAWYQQKPGKAPKLLIYSA |
| anti-PDL1 LC | SFLYSGVPSRFSGSGSGTDFTLTISSLQPEDFATYYCQQYLYHPATFGQGTK |
| fused to TIM3 | VEIKRTVAAPSVFIFPPSDEQLKSGTASVVCLLNNFYPREAKVQWKVDNAL |
| ECD | QSGNSQESVTEQDSKDSTYSLSSTLTLSKADYEKHKVYACEVTHQGLSSPV |
| | TKSFNRGECGGGGSGGGGSGGGGSSEVEYRAEVGQNAYLPCFYTPAAPGN |
| | LVPVCWGKGACPVFECGNVVLRTDERDVNYWTSRYWLNGDFRKGDVSL |
| | TIENVTLADSGIYCCRIQIPGIMNDEKFNLKLVIKPAKVTPAPTRQRDFTAAF |
| | PRMLTTRGHGPAETQTLGSLPDINLTQISTLANELRDSRLANDLRDSGATIRI |
| | G |
| SEQ ID NO: 463 | EVQLVESGGGLVQPGGSLRLSCAASGFTFSDSWIHWVRQAPGKGLEWVA |
| anti-PDL1 HC | WISPYGGSTYYADSVKGRFTISADTSKNTAYLQMNSLRAEDTAVYYCARR |
| fused to | HWPGGFDYWGQGTLVTVSAASTKGPSVFPLAPSSKSTSGGTAALGCLVKD |
| SIGLEC10 ECD | YFPEPVTVSWNSGALTSGVHTFPAVLQSSGLYSLSSVVTVPSSSLGTQTYIC |
| | NVNHKPSNTKVDKKVEPKSCDKTHTCPPCPAPELLGGPSVFLFPPKPKDTL |
| | MISRTPEVTCVVVDVSHEDPEVKFNWYVDGVEVHNAKTKPREEQYASTYR |
| | VVSVLTVLHQDWLNGKEYKCKVSNKALPAPIEKTISKAKGQPREPQVYTLP |
| | PSREEMTKNQVSLTCLVKGFYPSDIAVEWESNGQPENNYKTTPPVLDSDGS |
| | FFLYSKLTVDKSRWQQGNVFSCSVMHEALHNHYTQKSLSLSPGKGGGGSG |
| | GGGSGGGGSMDGRFWIRVQESVMVPEGLCISVPCSFSYPRQDWTGSTPAY |
| | GYWFKAVTETTKGAPVATNHQSREVEMSTRGRFQLTGDPAKGNCSLVIRD |
| | AQMQDESQYFFRVERGSYVRYNFMNDGFFLKVTALTQKPDVYIPETLEPG |
| | QPVTVICVFNWAFEECPPPSFSWTGAALSSQGTKPTTSHFSVLSFTPRPQDH |
| | NTDLTCHVDFSRKGVSAQRTVRLRVAYAPRDLVISISRDNTPALEPQPQGN |
| | VPYLEAQKGQFLRLLCAADSQPPATLSWVLQNRVLSSSHPWGPRPLGLELP |
| | GVKAGDSGRYTCRAENRLGSQQRALDLSVQYPPENLRVMVSQANRTVLE |
| | NLGNGTSLPVLEGQSLCLVCVTHSSPPARLSWTQRGQVLSPSQPSDPGVLE |
| | LPRVQVEHEGEFTCHARHPLGSQHVSLSLSVHYSPKLLGPSCSWEAEGLHC |
| | SCSSQASPAPSLRWWLGEELLEGNSSQDSFEVTPSSAGPWANSSLSLHGGLS |
| | SGLRLRCEAWNVHGAQSGSILQLPDKKGLIST |
| SEQ ID NO: 464 | DIQMTQSPSSLSASVGDRVTITCRASQDVSTAVAWYQQKPGKAPKLLIYSA |
| anti-PDL1 LC | SFLYSGVPSRFSGSGSGTDFTLTISSLQPEDFATYYCQQYLYHPATFGQGTK |
| fused to BTLA | VEIKRTVAAPSVFIFPPSDEQLKSGTASVVCLLNNFYPREAKVQWKVDNAL |
| ECD | QSGNSQESVTEQDSKDSTYSLSSTLTLSKADYEKHKVYACEVTHQGLSSPV |
| | TKSFNRGECGGGGSGGGGSGGGGSKESCDVQLYIKRQSEHSILAGDPFELE |
| | CPVKYCANRPHVTWCKLNGTTCVKLEDRQTSWKEEKNISFFILHFEPVLPN |
| | DNGSYRCSANFQSNLIESHSTTLYVTDVKSASERPSKDEMAS |
| SEQ ID NO: 465 | EVQLVESGGGLVQPGGSLRLSCAASGFTFSDSWIHWVRQAPGKGLEWVA |
| anti-PDL1 HC | WISPYGGSTYYADSVKGRFTISADTSKNTAYLQMNSLRAEDTAVYYCARR |
| fused to SIRPa | HWPGGFDYWGQGTLVTVSAASTKGPSVFPLAPSSKSTSGGTAALGCLVKD |
| ECD | YFPEPVTVSWNSGALTSGVHTFPAVLQSSGLYSLSSVVTVPSSSLGTQTYIC |
| | NVNHKPSNTKVDKKVEPKSCDKTHTCPPCPAPELLGGPSVFLFPPKPKDTL |
| | MISRTPEVTCVVVDVSHEDPEVKFNWYVDGVEVHNAKTKPREEQYASTYR |
| | VVSVLTVLHQDWLNGKEYKCKVSNKALPAPIEKTISKAKGQPREPQVYTLP |
| | PSREEMTKNQVSLTCLVKGFYPSDIAVEWESNGQPENNYKTTPPVLDSDGS |
| | FFLYSKLTVDKSRWQQGNVFSCSVMHEALHNHYTQKSLSLSPGKGGGGSG |
| | GGGSGGGGSEEELQVIQPDKSVLVAAGETATLRCTATSLIPVGPIQWFRGA |
| | GPGRELIYNQKEGHFPRVTTVSDLTKRNNMDFSIRIGNITPADAGTYYCVKF |
| | RKGSPDDVEFKSGAGTELSVRAKPS |
| SEQ ID NO: 466 | EVQLVESGGGLVQPGGSLRLSCAASGFTFSDSWIHWVRQAPGKGLEWVA |
| anti-PDL1 HC | WISPYGGSTYYADSVKGRFTISADTSKNTAYLQMNSLRAEDTAVYYCARR |
| fused to TGFbR | HWPGGFDYWGQGTLVTVSAASTKGPSVFPLAPSSKSTSGGTAALGCLVKD |
| ECD | YFPEPVTVSWNSGALTSGVHTFPAVLQSSGLYSLSSVVTVPSSSLGTQTYIC |
| | NVNHKPSNTKVDKKVEPKSCDKTHTCPPCPAPELLGGPSVFLFPPKPKDTL |
| | MISRTPEVTCVVVDVSHEDPEVKFNWYVDGVEVHNAKTKPREEQYASTYR |
| | VVSVLTVLHQDWLNGKEYKCKVSNKALPAPIEKTISKAKGQPREPQVYTLP |
| | PSREEMTKNQVSLTCLVKGFYPSDIAVEWESNGQPENNYKTTPPVLDSDGS |
| | FFLYSKLTVDKSRWQQGNVFSCSVMHEALHNHYTQKSLSLSPGKGGGGSG |
| | GGGSGGGGSTIPPHVQKSVNNDMIVTDNNGAVKFPQLCKFCDVRFSTCDN |
| | QKSCMSNCSITSICEKPQEVCVAVWRKNDENITLETVCHDPKLPYHDFILED |
| | AASPKCIMKEKKKPGETFFMCSCSSDECNDNIIFSEEYNTSNPD |
| SEQ ID NO: 467 | EVQLVESGGGLVQPGGSLRLSCAASGFTFSDSWIHWVRQAPGKGLEWVA |
| anti-PDL1 HC | WISPYGGSTYYADSVKGRFTISADTSKNTAYLQMNSLRAEDTAVYYCARR |
| fused to TIM3 | HWPGGFDYWGQGTLVTVSAASTKGPSVFPLAPSSKSTSGGTAALGCLVKD |
| ECD | YFPEPVTVSWNSGALTSGVHTFPAVLQSSGLYSLSSVVTVPSSSLGTQTYIC |
| | NVNHKPSNTKVDKKVEPKSCDKTHTCPPCPAPELLGGPSVFLFPPKPKDTL |
| | MISRTPEVTCVVVDVSHEDPEVKFNWYVDGVEVHNAKTKPREEQYASTYR |
| | VVSVLTVLHQDWLNGKEYKCKVSNKALPAPIEKTISKAKGQPREPQVYTLP |
| | PSREEMTKNQVSLTCLVKGFYPSDIAVEWESNGQPENNYKTTPPVLDSDGS |
| | FFLYSKLTVDKSRWQQGNVFSCSVMHEALHNHYTQKSLSLSPGKGGGGSG |
| | GGGSGGGGSSEVEYRAEVGQNAYLPCFYTPAAPGNLVPVCWGKGACPVF |
| | ECGNVVLRTDERDVNYWTSRYWLNGDFRKGDVSLTIENVTLADSGIYCCR |
| | IQIPGIMNDEKFNLKLVIKPAKVTPAPTRQRDFTAAFPRMLIIRGHGPAETQ |
| | TLGSLPDINLTQISTLANELRDSRLANDLRDSGATIRIG |
| SEQ ID NO: 468 | EVQLVESGGGLVQPGGSLRLSCAASGFTFSDSWIHWVRQAPGKGLEWVA |
| anti-PDL1 HC | WISPYGGSTYYADSVKGRFTISADTSKNTAYLQMNSLRAEDTAVYYCARR |
| fused to VEGFR | HWPGGFDYWGQGTLVTVSAASTKGPSVFPLAPSSKSTSGGTAALGCLVKD |
| ECD | YFPEPVTVSWNSGALTSGVHTFPAVLQSSGLYSLSSVVTVPSSSLGTQTYIC |
| | NVNHKPSNTKVDKKVEPKSCDKTHTCPPCPAPELLGGPSVFLFPPKPKDTL |
| | MISRTPEVTCVVVDVSHEDPEVKFNWYVDGVEVHNAKTKPREEQYASTYR |
| | VVSVLTVLHQDWLNGKEYKCKVSNKALPAPIEKTISKAKGQPREPQVYTLP |
| | PSREEMTKNQVSLTCLVKGFYPSDIAVEWESNGQPENNYKTTPPVLDSDGS |
| | FFLYSKLTVDKSRWQQGNVFSCSVMHEALHNHYTQKSLSLSPGKGGGGSG |
| | GGGSGGGGSSDTGRPFVEMYSEIPEIIHMTEGRELVIPCRVTSPNITVTLKKF |
| | PLDTLIPDGKRIIWDSRKGFIISNATYKEIGLLTCEATVNGHLYKTNYLTHRQ |
| | TNTIIDVVLSPSHGIELSVGEKLVLNCTARTELNVGIDFNWEYPSSKHQHKK |
| | LVNRDLKTQSGSEMKKFLSTLTIDGVTRSDQGLYTCAASSGLMTKKNSTFV |
| | RVHEK |
| SEQ ID NO: 469 | EVQLQQSGPGLVKPSQTLSLTCAISGDSVSSNSAAWNWIRQSPSRGLEWLG |
| anti-TIGIT HC | KTYYRFKWYSDYAVSVKGRITINPDTSKNQFSLQLNSVTPEDTAVFYCTRE |
| fused to BTLA | STTYDLLAGPFDYWGQGTLVTVSSASTKGPSVFPLAPSSKSTSGGTAALGC |
| ECD | LVKDYFPEPVTVSWNSGALTSGVHTFPAVLQSSGLYSLSSVVTVPSSSLGTQ |
| | TYICNVNHKPSNTKVDKKVEPKSCDKTHTCPPCPAPELLGGPSVFLFPPKPK |
| | DTLMISRTPEVTCVVVDVSHEDPEVKFNWYVDGVEVHNAKTKPREEQYNS |
| | TYRVVSVLTVLHQDWLNGKEYKCKVSNKALPAPIEKTISKAKGQPREPQV |
| | YTLPPSREEMTKNQVSLTCLVKGFYPSDIAVEWESNGQPENNYKTTPPVLD |
| | SDGSFFLYSKLTVDKSRWQQGNVFSCSVMHEALHNHYTQKSLSLSPGKGG |
| | GGSGGGGSGGGGSKESCDVQLYIKRQSEHSILAGDPFELECPVKYCANRPH |
| | VTWCKLNGTTCVKLEDRQTSWKEEKNISFFILHFEPVLPNDNGSYRCSANF |
| | QSNLIESHSTTLYVTDVKSASERPSKDEMAS |
| SEQ ID NO: 470 | DIVMTQSPDSLAVSLGERATINCKSSQTVLYSSNNKKYLAWYQQKPGQPPN |
| anti-TIGIT LC | LLIYWASTRESGVPDRFSGSGSGTDFTLTISSLQAEDVAVYYCQQYYSTPFT |
| fused to PD1 ECD | FGPGTKVEIKRTVAAPSVFIFPPSDEQLKSGTASVVCLLNNFYPREAKVQW |
| | KVDNALQSGNSQESVTEQDSKDSTYSLSSTLTLSKADYEKHKVYACEVTH |
| | QGLSSPVTKSFNRGECGGGGSGGGGSGGGGSPGWFLDSPDRPWNPPTFSPA |
| | LLVVTEGDNATFTCSFSNTSESFVLNWYRMSPSNQTDKLAAFPEDRSQPGQ |
| | DCRFRVTQLPNGRDFHMSVVRARRNDSGTYLCGAISLAPKAQIKESLRAEL |
| | RVTERRAEVPTAHPSPSPRPAGQFQTLV |
| SEQ ID NO: 471 | DIVMTQSPDSLAVSLGERATINCKSSQTVLYSSNNKKYLAWYQQKPGQPPN |
| anti-TIGIT LC | LLIYWASTRESGVPDRFSGSGSGTDFTLTISSLQAEDVAVYYCQQYYSTPFT |
| fused to | FGPGTKVEIKRTVAAPSVFIFPPSDEQLKSGTASVVCLLNNFYPREAKVQW |
| SIGLEC10 ECD | KVDNALQSGNSQESVTEQDSKDSTYSLSSTLTLSKADYEKHKVYACEVTH |
| | QGLSSPVTKSFNRGECGGGGSGGGGSGGGGSMDGRFWIRVQESVMVPEGL |
| | CISVPCSFSYPRQDWTGSTPAYGYWFKAVTETTKGAPVATNHQSREVEMS |
| | TRGRFQLTGDPAKGNCSLVIRDAQMQDESQYFFRVERGSYVRYNFMNDGF |
| | FLKVTALTQKPDVYIPETLEPGQPVTVICVFNWAFEECPPPSFSWTGAALSS |
| | QGTKPTTSHFSVLSFTPRPQDHNTDLTCHVDFSRKGVSAQRTVRLRVAYAP |
| | RDLVISISRDNTPALEPQPQGNVPYLEAQKGQFLRLLCAADSQPPATLSWVL |
| | QNRVLSSSHPWGPRPLGLELPGVKAGDSGRYTCRAENRLGSQQRALDLSV |
| | QYPPENLRVMVSQANRTVLENLGNGTSLPVLEGQSLCLVCVTHSSPPARLS |
| | WTQRGQVLSPSQPSDPGVLELPRVQVEHEGEFTCHARHPLGSQHVSLSLSV |
| | HYSPKLLGPSCSWEAEGLHCSCSSQASPAPSLRWWLGEELLEGNSSQDSEE |
| | VTPSSAGPWANSSLSLHGGLSSGLRLRCEAWNVHGAQSGSILQLPDKKGLI |
| | ST |
| SEQ ID NO: 472 | DIVMTQSPDSLAVSLGERATINCKSSQTVLYSSNNKKYLAWYQQKPGQPPN |
| anti-TIGIT LC | LLIYWASTRESGVPDRFSGSGSGTDFTLTISSLQAEDVAVYYCQQYYSTPFT |
| fused to SIRPa | FGPGTKVEIKRTVAAPSVFIFPPSDEQLKSGTASVVCLLNNFYPREAKVQW |
| ECD | KVDNALQSGNSQESVTEQDSKDSTYSLSSTLTLSKADYEKHKVYACEVTH |
| | QGLSSPVTKSFNRGECGGGGSGGGGSGGGGSEEELQVIQPDKSVLVAAGET |
| | ATLRCTATSLIPVGPIQWFRGAGPGRELIYNQKEGHFPRVTTVSDLTKRNN |
| | MDFSIRIGNITPADAGTYYCVKFRKGSPDDVEFKSGAGTELSVRAKPS |
| SEQ ID NO: 473 | DIVMTQSPDSLAVSLGERATINCKSSQTVLYSSNNKKYLAWYQQKPGQPPN |
| anti-TIGIT LC | LLIYWASTRESGVPDRFSGSGSGTDFTLTISSLQAEDVAVYYCQQYYSTPFT |
| fused to TIM3 | FGPGTKVEIKRTVAAPSVFIFPPSDEQLKSGTASVVCLLNNFYPREAKVQW |
| ECD | KVDNALQSGNSQESVTEQDSKDSTYSLSSTLTLSKADYEKHKVYACEVTH |
| | QGLSSPVTKSFNRGECGGGGSGGGGSGGGGSSEVEYRAEVGQNAYLPCFY |
| | TPAAPGNLVPVCWGKGACPVFECGNVVLRTDERDVNYWTSRYWLNGDFR |
| | KGDVSLTIENVTLADSGIYCCRIQIPGIMNDEKFNLKLVIKPAKVTPAPTRQR |
| | DFTAAFPRMLTTRGHGPAETQTLGSLPDINLTQISTLANELRDSRLANDLRD |
| | SGATIRIG |
| SEQ ID NO: 474 | EVQLQQSGPGLVKPSQTLSLTCAISGDSVSSNSAAWNWIRQSPSRGLEWLG |
| anti-TIGIT HC | KTYYRFKWYSDYAVSVKGRITINPDTSKNQFSLQLNSVTPEDTAVFYCTRE |
| fused to PD1 ECD | STTYDLLAGPFDYWGQGTLVTVSSASTKGPSVFPLAPSSKSTSGGTAALGC |
| | LVKDYFPEPVTVSWNSGALTSGVHTFPAVLQSSGLYSLSSVVTVPSSSLGTQ |
| | TYICNVNHKPSNTKVDKKVEPKSCDKTHTCPPCPAPELLGGPSVFLFPPKPK |
| | DTLMISRTPEVTCVVVDVSHEDPEVKFNWYVDGVEVHNAKTKPREEQYNS |
| | TYRVVSVLTVLHQDWLNGKEYKCKVSNKALPAPIEKTISKAKGQPREPQV |
| | YTLPPSREEMTKNQVSLTCLVKGFYPSDIAVEWESNGQPENNYKTTPPVLD |
| | SDGSFFLYSKLTVDKSRWQQGNVFSCSVMHEALHNHYTQKSLSLSPGKGG |
| | GGSGGGGSGGGGSPGWFLDSPDRPWNPPTFSPALLVVTEGDNATFTCSFSN |
| | TSESFVLNWYRMSPSNQTDKLAAFPEDRSQPGQDCRFRVTQLPNGRDFHM |
| | SVVRARRNDSGTYLCGAISLAPKAQIKESLRAELRVTERRAEVPTAHPSPSP |
| | RPAGQFQTLV |
| SEQ ID NO: 475 | DIVMTQSPDSLAVSLGERATINCKSSQTVLYSSNNKKYLAWYQQKPGQPPN |
| anti-TIGIT LC | LLIYWASTRESGVPDRFSGSGSGTDFTLTISSLQAEDVAVYYCQQYYSTPFT |
| fused to BTLA | FGPGTKVEIKRTVAAPSVFIFPPSDEQLKSGTASVVCLLNNFYPREAKVQW |
| ECD | KVDNALQSGNSQESVTEQDSKDSTYSLSSTLTLSKADYEKHKVYACEVTH |
| | QGLSSPVTKSFNRGECGGGGSGGGGSGGGGSKESCDVQLYIKRQSEHSILA |
| | GDPFELECPVKYCANRPHVTWCKLNGTTCVKLEDRQTSWKEEKNISFFILH |
| | FEPVLPNDNGSYRCSANFQSNLIESHSTTLYVTDVKSASERPSKDEMAS |
| SEQ ID NO: 476 | EVQLQQSGPGLVKPSQTLSLTCAISGDSVSSNSAAWNWIRQSPSRGLEWLG |
| anti-TIGIT HC | KTYYRFKWYSDYAVSVKGRITINPDTSKNQFSLQLNSVTPEDTAVFYCTRE |
| fused to | STTYDLLAGPFDYWGQGTLVTVSSASTKGPSVFPLAPSSKSTSGGTAALGC |
| SIGLEC10 ECD | LVKDYFPEPVTVSWNSGALTSGVHTFPAVLQSSGLYSLSSVVTVPSSSLGTQ |
| | TYICNVNHKPSNTKVDKKVEPKSCDKTHTCPPCPAPELLGGPSVFLFPPKPK |
| | DTLMISRTPEVTCVVVDVSHEDPEVKFNWYVDGVEVHNAKTKPREEQYNS |
| | TYRVVSVLTVLHQDWLNGKEYKCKVSNKALPAPIEKTISKAKGQPREPQV |
| | YTLPPSREEMTKNQVSLTCLVKGFYPSDIAVEWESNGQPENNYKTTPPVLD |
| | SDGSFFLYSKLTVDKSRWQQGNVFSCSVMHEALHNHYTQKSLSLSPGKGG |
| | GGSGGGGSGGGGSMDGRFWIRVQESVMVPEGLCISVPCSFSYPRQDWTGS |
| | TPAYGYWFKAVTETTKGAPVATNHQSREVEMSTRGRFQLTGDPAKGNCSL |
| | VIRDAQMQDESQYFFRVERGSYVRYNFMNDGFFLKVTALTQKPDVYIPET |
| | LEPGQPVTVICVFNWAFEECPPPSFSWTGAALSSQGTKPTTSHFSVLSFTPRP |
| | QDHNTDLTCHVDFSRKGVSAQRTVRLRVAYAPRDLVISISRDNTPALEPQP |
| | QGNVPYLEAQKGQFLRLLCAADSQPPATLSWVLQNRVLSSSHPWGPRPLG |
| | LELPGVKAGDSGRYTCRAENRLGSQQRALDLSVQYPPENLRVMVSQANRT |
| | VLENLGNGTSLPVLEGQSLCLVCVTHSSPPARLSWTQRGQVLSPSQPSDPG |
| | VLELPRVQVEHEGEFTCHARHPLGSQHVSLSLSVHYSPKLLGPSCSWEAEG |
| | LHCSCSSQASPAPSLRWWLGEELLEGNSSQDSFEVTPSSAGPWANSSLSLH |
| | GGLSSGLRLRCEAWNVHGAQSGSILQLPDKKGLIST |
| SEQ ID NO: 477 | EVQLQQSGPGLVKPSQTLSLTCAISGDSVSSNSAAWNWIRQSPSRGLEWLG |
| anti-TIGIT HC | KTYYRFKWYSDYAVSVKGRITINPDTSKNQFSLQLNSVTPEDTAVFYCTRE |
| fused to SIRPa | STTYDLLAGPFDYWGQGTLVTVSSASTKGPSVFPLAPSSKSTSGGTAALGC |
| ECD | LVKDYFPEPVTVSWNSGALTSGVHTFPAVLQSSGLYSLSSVVTVPSSSLGTQ |
| | TYICNVNHKPSNTKVDKKVEPKSCDKTHTCPPCPAPELLGGPSVFLFPPKPK |
| | DTLMISRTPEVTCVVVDVSHEDPEVKFNWYVDGVEVHNAKTKPREEQYNS |
| | TYRVVSVLTVLHQDWLNGKEYKCKVSNKALPAPIEKTISKAKGQPREPQV |
| | YTLPPSREEMTKNQVSLTCLVKGFYPSDIAVEWESNGQPENNYKTTPPVLD |
| | SDGSFFLYSKLTVDKSRWQQGNVFSCSVMHEALHNHYTQKSLSLSPGKGG |
| | GGSGGGGSGGGGSEEELQVIQPDKSVLVAAGETATLRCTATSLIPVGPIQW |
| | FRGAGPGRELIYNQKEGHFPRVTTVSDLTKRNNMDFSIRIGNITPADAGTYY |
| | CVKFRKGSPDDVEFKSGAGTELSVRAKPS |
| SEQ ID NO: 478 | EVQLQQSGPGLVKPSQTLSLTCAISGDSVSSNSAAWNWIRQSPSRGLEWLG |
| anti-TIGIT HC | KTYYRFKWYSDYAVSVKGRITINPDTSKNQFSLQLNSVTPEDTAVFYCTRE |
| fused to TGFbR | STTYDLLAGPFDYWGQGTLVTVSSASTKGPSVFPLAPSSKSTSGGTAALGC |
| ECD | LVKDYFPEPVTVSWNSGALTSGVHTFPAVLQSSGLYSLSSVVTVPSSSLGTQ |
| | TYICNVNHKPSNTKVDKKVEPKSCDKTHTCPPCPAPELLGGPSVFLFPPKPK |
| | DTLMISRTPEVTCVVVDVSHEDPEVKFNWYVDGVEVHNAKTKPREEQYNS |
| | TYRVVSVLTVLHQDWLNGKEYKCKVSNKALPAPIEKTISKAKGQPREPQV |
| | YTLPPSREEMTKNQVSLTCLVKGFYPSDIAVEWESNGQPENNYKTTPPVLD |
| | SDGSFFLYSKLTVDKSRWQQGNVFSCSVMHEALHNHYTQKSLSLSPGKGG |
| | GGSGGGGSGGGGSTIPPHVQKSVNNDMIVTDNNGAVKFPQLCKFCDVRFS |
| | TCDNQKSCMSNCSITSICEKPQEVCVAVWRKNDENITLETVCHDPKLPYHD |
| | FILEDAASPKCIMKEKKKPGETFFMCSCSSDECNDNIIFSEEYNTSNPD |
| SEQ ID NO: 479 | EVQLQQSGPGLVKPSQTLSLTCAISGDSVSSNSAAWNWIRQSPSRGLEWLG |
| anti-TIGIT HC | KTYYRFKWYSDYAVSVKGRITINPDTSKNQFSLQLNSVTPEDTAVFYCTRE |
| fused to TIM3 | STTYDLLAGPFDYWGQGTLVTVSSASTKGPSVFPLAPSSKSTSGGTAALGC |
| ECD | LVKDYFPEPVTVSWNSGALTSGVHTFPAVLQSSGLYSLSSVVTVPSSSLGTQ |
| | TYICNVNHKPSNTKVDKKVEPKSCDKTHTCPPCPAPELLGGPSVFLFPPKPK |
| | DTLMISRTPEVTCVVVDVSHEDPEVKFNWYVDGVEVHNAKTKPREEQYNS |
| | TYRVVSVLTVLHQDWLNGKEYKCKVSNKALPAPIEKTISKAKGQPREPQV |
| | YTLPPSREEMTKNQVSLTCLVKGFYPSDIAVEWESNGQPENNYKTTPPVLD |
| | SDGSFFLYSKLTVDKSRWQQGNVFSCSVMHEALHNHYTQKSLSLSPGKGG |
| | GGSGGGGSGGGGSSEVEYRAEVGQNAYLPCFYTPAAPGNLVPVCWGKGA |
| | CPVFECGNVVLRTDERDVNYWTSRYWLNGDFRKGDVSLTIENVTLADSGI |
| | YCCRIQIPGIMNDEKFNLKLVIKPAKVTPAPTRQRDFTAAFPRMLTTRGHGP |
| | AETQTLGSLPDINLTQISTLANELRDSRLANDLRDSGATIRIG |
| SEQ ID NO: 480 | EVQLQQSGPGLVKPSQTLSLTCAISGDSVSSNSAAWNWIRQSPSRGLEWLG |
| anti-TIGIT HC | KTYYRFKWYSDYAVSVKGRITINPDTSKNQFSLQLNSVTPEDTAVFYCTRE |
| fused to VEGFR | STTYDLLAGPFDYWGQGTLVTVSSASTKGPSVFPLAPSSKSTSGGTAALGC |
| ECD | LVKDYFPEPVTVSWNSGALTSGVHTFPAVLQSSGLYSLSSVVTVPSSSLGTQ |
| | TYICNVNHKPSNTKVDKKVEPKSCDKTHTCPPCPAPELLGGPSVFLFPPKPK |
| | DTLMISRTPEVTCVVVDVSHEDPEVKFNWYVDGVEVHNAKTKPREEQYNS |
| | TYRVVSVLTVLHQDWLNGKEYKCKVSNKALPAPIEKTISKAKGQPREPQV |
| | YTLPPSREEMTKNQVSLTCLVKGFYPSDIAVEWESNGQPENNYKTTPPVLD |
| | SDGSFFLYSKLTVDKSRWQQGNVFSCSVMHEALHNHYTQKSLSLSPGKGG |
| | GGSGGGGSGGGGSSDTGRPFVEMYSEIPEIIHMTEGRELVIPCRVTSPNITVT |
| | LKKFPLDTLIPDGKRIIWDSRKGFIISNATYKEIGLLTCEATVNGHLYKTNYL |
| | THRQTNTI1DVVLSPSHGIELSVGEKLVLNCTARTELNVGIDFNWEYPSSKH |
| | QHKKLVNRDLKTQSGSEMKKFLSTLTIDGVTRSDQGLYTCAASSGLMTKK |
| | NSTFVRVHEK |
| SEQ ID NO: 481 | QSALTQPRSVSGSPGQSVTISCTGTSSDVGGYNYVSWYQQHPGKAPKLMIY |
| anti-TIM3 HC | DVSKRPSGVPDRFSGSKSGNTASLTISGLQAEDEADYYCSSYADSVVFGGG |
| fused to BTLA | TKVTVLGQPKAAPSVTLFPPSSEELQANKATLVCLISDFYPGAVTVAWKAD |
| ECD | SSPVKAGVETTTPSKQSNNKYAASSYLSLTPEQWKSHKSYSCQVTHEGSTV |
| | EKTVAPTECSGGGGSGGGGSGGGGSKESCDVQLYIKRQSEHSILAGDPFEL |
| | ECPVKYCANRPHVTWCKLNGTTCVKLEDRQTSWKEEKNISFFILHFEPVLP |
| | NDNGSYRCSANFQSNLIESHSTTLYVTDVKSASERPSKDEMAS |
| SEQ ID NO: 482 | EVQLVESGGGLVQPGGSLRLSCAASGFTFSSYAMSWVRQAPGKGLEWVSA |
| anti-TIM3 LC | ISVSGGSTYYADSVKGRFTISRDNSKNTLYLQMNSLRAEDTAVYYCAKAN |
| fused to PD1 ECD | WGFFDYWGQGTLVTVSSASTKGPSVFPLAPSSKSTSGGTAALGCLVKDYFP |
| | EPVTVSWNSGALTSGVHIFPAVLQSSGLYSLSSVVTVPSSSLGTQTYICNVN |
| | HKPSNTKVDKKVEPKSCDKTHTCPPCPAPELLGGPSVFLFPPKPKDTLMISR |
| | TPEVTCVVVDVSHEDPEVKFNWYVDGVEVHNAKTKPREEQYNSTYRVVS |
| | VLTVLHQDWLNGKEYKCKVSNKALPAPIEKTISKAKGQPREPQVYTLPPSR |
| | EEMTKNQVSLTCLVKGFYPSDIAVEWESNGQPENNYKTTPPVLDSDGSFFL |
| | YSKLTVDKSRWQQGNVFSCSVMHEALHNHYTQKSLSLSPGKGGGGSGGG |
| | GSGGGGSPGWFLDSPDRPWNPPTFSPALLVVTEGDNATFTCSFSNTSESFVL |
| | NWYRMSPSNQTDKLAAFPEDRSQPGQDCRFRVTQLPNGRDFHMSVVRAR |
| | RNDSGTYLCGAISLAPKAQIKESLRAELRVTERRAEVPTAHPSPSPRPAGQF |
| | QTLV |
| SEQ ID NO: 483 | EVQLVESGGGLVQPGGSLRLSCAASGFTFSSYAMSWVRQAPGKGLEWVSA |
| anti-TIM3 LC | ISVSGGSTYYADSVKGRFTISRDNSKNTLYLQMNSLRAEDTAVYYCAKAN |
| fused to | WGFFDYWGQGTLVTVSSASTKGPSVFPLAPSSKSTSGGTAALGCLVKDYFP |
| SIGLEC10 ECD | EPVTVSWNSGALTSGVHTFPAVLQSSGLYSLSSVVTVPSSSLGTQTYICNVN |
| | HKPSNTKVDKKVEPKSCDKTHTCPPCPAPELLGGPSVFLFPPKPKDTLMISR |
| | TPEVTCVVVDVSHEDPEVKFNWYVDGVEVHNAKTKPREEQYNSTYRVVS |
| | VLTVLHQDWLNGKEYKCKVSNKALPAPIEKTISKAKGQPREPQVYTLPPSR |
| | EEMTKNQVSLTCLVKGFYPSDIAVEWESNGQPENNYKTTPPVLDSDGSFFL |
| | YSKLTVDKSRWQQGNVFSCSVMHEALHNHYTQKSLSLSPGKGGGGSGGG |
| | GSGGGGSMDGRFWIRVQESVMVPEGLCISVPCSFSYPRQDWTGSTPAYGY |
| | WFKAVTETTKGAPVATNHQSREVEMSTRGRFQLTGDPAKGNCSLVIRDAQ |
| | MQDESQYFFRVERGSYVRYNFMNDGFFLKVTALTQKPDVYIPETLEPGQP |
| | VTVICVFNWAFEECPPPSFSWTGAALSSQGTKPTTSHFSVLSFTPRPQDHNT |
| | DLTCHVDFSRKGVSAQRTVRLRVAYAPRDLVISISRDNTPALEPQPQGNVP |
| | YLEAQKGQFLRLLCAADSQPPATLSWVLQNRVLSSSHPWGPRPLGLELPGV |
| | KAGDSGRYTCRAENRLGSQQRALDLSVQYPPENLRVMVSQANRTVLENL |
| | GNGTSLPVLEGQSLCLVCVTHSSPPARLSWTQRGQVLSPSQPSDPGVLELPR |
| | VQVEHEGEFTCHARHPLGSQHVSLSLSVHYSPKLLGPSCSWEAEGLHCSCS |
| | SQASPAPSLRWWLGEELLEGNSSQDSFEVTPSSAGPWANSSLSLHGGLSSG |
| | LRLRCEAWNVHGAQSGSILQLPDKKGLIST |
| SEQ ID NO: 484 | EVQLVESGGGLVQPGGSLRLSCAASGFTFSSYAMSWVRQAPGKGLEWVSA |
| anti-TIM3 LC | ISVSGGSTYYADSVKGRFTISRDNSKNTLYLQMNSLRAEDTAVYYCAKAN |
| fused to SIRPa | WGFFDYWGQGTLVTVSSASTKGPSVFPLAPSSKSTSGGTAALGCLVKDYFP |
| ECD | EPVTVSWNSGALTSGVHTFPAVLQSSGLYSLSSVVTVPSSSLGTQTYICNVN |
| | HKPSNTKVDKKVEPKSCDKTHTCPPCPAPELLGGPSVFLFPPKPKDTLMISR |
| | TPEVTCVVVDVSHEDPEVKFNWYVDGVEVHNAKTKPREEQYNSTYRVVS |
| | VLTVLHQDWLNGKEYKCKVSNKALPAPIEKTISKAKGQPREPQVYTLPPSR |
| | EEMTKNQVSLTCLVKGFYPSDIAVEWESNGQPENNYKTTPPVLDSDGSFFL |
| | YSKLTVDKSRWQQGNVFSCSVMHEALHNHYTQKSLSLSPGKGGGGSGGG |
| | GSGGGGSEEELQVIQPDKSVLVAAGETATLRCTATSLIPVGPIQWFRGAGPG |
| | RELIYNQKEGHFPRVTTVSDLTKRNNMDFSIRIGNITPADAGTYYCVKFRK |
| | GSPDDVEFKSGAGTELSVRAKPS |
| SEQ ID NO: 485 | EVQLVESGGGLVQPGGSLRLSCAASGFTFSSYAMSWVRQAPGKGLEWVSA |
| anti-TIM3 LC | ISVSGGSTYYADSVKGRFTISRDNSKNTLYLQMNSLRAEDTAVYYCAKAN |
| fused to TIM3 | WGFFDYWGQGTLVTVSSASTKGPSVFPLAPSSKSTSGGTAALGCLVKDYFP |
| ECD | EPVTVSWNSGALTSGVHTFPAVLQSSGLYSLSSVVTVPSSSLGTQTYICNVN |
| | HKPSNTKVDKKVEPKSCDKTHTCPPCPAPELLGGPSVFLFPPKPKDTLMISR |
| | TPEVTCVVVDVSHEDPEVKFNWYVDGVEVHNAKTKPREEQYNSTYRVVS |
| | VLTVLHQDWLNGKEYKCKVSNKALPAPIEKTISKAKGQPREPQVYTLPPSR |
| | EEMTKNQVSLTCLVKGFYPSDIAVEWESNGQPENNYKTTPPVLDSDGSFFL |
| | YSKLTVDKSRWQQGNVFSCSVMHEALHNHYTQKSLSLSPGKGGGGSGGG |
| | GSGGGGSSEVEYRAEVGQNAYLPCFYTPAAPGNLVPVCWGKGACPVFECG |
| | NVVLRTDERDVNYWTSRYWLNGDFRKGDVSLTIENVTLADSGIYCCRIQIP |
| | GIMNDEKFNLKLVIKPAKVTPAPTRQRDFTAAFPRMLTTRGHGPAETQTLG |
| | SLPDINLTQISTLANELRDSRLANDLRDSGATIRIG |
| SEQ ID NO: 486 | QSALTQPRSVSGSPGQSVTISCTGTSSDVGGYNYVSWYQQHPGKAPKLMIY |
| anti-TIM3 HC | DVSKRPSGVPDRFSGSKSGNTASLTISGLQAEDEADYYCSSYADSVVFGGG |
| fused to PD1 ECD | TKVTVLGQPKAAPSVTLFPPSSEELQANKATLVCLISDFYPGAVTVAWKAD |
| | SSPVKAGVETTTPSKQSNNKYAASSYLSLTPEQWKSHKSYSCQVTHEGSTV |
| | EKTVAPTECSGGGGSGGGGSGGGGSPGWFLDSPDRPWNPPTFSPALLVVTE |
| | GDNATFTCSFSNTSESFVLNWYRMSPSNQTDKLAAFPEDRSQPGQDCRFRV |
| | TQLPNGRDFHMSVVRARRNDSGTYLCGAISLAPKAQIKESLRAELRVTERR |
| | AEVPTAHPSPSPRPAGQFQTLV |
| SEQ ID NO: 487 | EVQLVESGGGLVQPGGSLRLSCAASGFTFSSYAMSWVRQAPGKGLEWVSA |
| anti-TIM3 LC | ISVSGGSTYYADSVKGRFTISRDNSKNTLYLQMNSLRAEDTAVYYCAKAN |
| fused to BTLA | WGFFDYWGQGTLVTVSSASTKGPSVFPLAPSSKSTSGGTAALGCLVKDYFP |
| ECD | EPVTVSWNSGALTSGVHTFPAVLQSSGLYSLSSVVTVPSSSLGTQTYICNVN |
| | HKPSNTKVDKKVEPKSCDKTHTCPPCPAPELLGGPSVFLFPPKPKDTLMISR |
| | TPEVTCVVVDVSHEDPEVKFNWYVDGVEVHNAKTKPREEQYNSTYRVVS |
| | VLTVLHQDWLNGKEYKCKVSNKALPAPIEKTISKAKGQPREPQVYTLPPSR |
| | EEMTKNQVSLTCLVKGFYPSDIAVEWESNGQPENNYKTTPPVLDSDGSFFL |
| | YSKLTVDKSRWQQGNVFSCSVMHEALHNHYTQKSLSLSPGKGGGGSGGG |
| | GSGGGGSKESCDVQLYIKRQSEHSILAGDPFELECPVKYCANRPHVTWCKL |
| | NGTTCVKLEDRQTSWKEEKNISFFILHEEPVLPNDNGSYRCSANFQSNLIES |
| | HSTTLYVTDVKSASERPSKDEMAS |
| SEQ ID NO: 488 | QSALTQPRSVSGSPGQSVTISCTGTSSDVGGYNYVSWYQQHPGKAPKLMIY |
| anti-TIM3 HC | DVSKRPSGVPDRFSGSKSGNTASLTISGLQAEDEADYYCSSYADSVVFGGG |
| fused to | TKVTVLGQPKAAPSVTLFPPSSEELQANKATLVCLISDFYPGAVTVAWKAD |
| SIGLEC10 ECD | SSPVKAGVETTTPSKQSNNKYAASSYLSLTPEQWKSHKSYSCQVTHEGSTV |
| | EKTVAPTECSGGGGSGGGGSGGGGSMDGRFWIRVQESVMVPEGLCISVPC |
| | SFSYPRQDWTGSTPAYGYWFKAVTETTKGAPVATNHQSREVEMSTRGRFQ |
| | LTGDPAKGNCSLVIRDAQMQDESQYFFRVERGSYVRYNFMNDGFFLKVTA |
| | LTQKPDVYIPETLEPGQPVTVICVFNWAFEECPPPSFSWTGAALSSQGTKPT |
| | TSHFSVLSFTPRPQDHNTDLTCHVDFSRKGVSAQRTVRLRVAYAPRDLVISI |
| | SRDNTPALEPQPQGNVPYLEAQKGQFLRLLCAADSQPPATLSWVLQNRVL |
| | SSSHPWGPRPLGLELPGVKAGDSGRYTCRAENRLGSQQRALDLSVQYPPEN |
| | LRVMVSQANRTVLENLGNGTSLPVLEGQSLCLVCVTHSSPPARLSWTQRG |
| | QVLSPSQPSDPGVLELPRVQVEHEGEFTCHARHPLGSQHVSLSLSVHYSPKL |
| | LGPSCSWEAEGLHCSCSSQASPAPSLRWWLGEELLEGNSSQDSFEVTPSSA |
| | GPWANSSLSLHGGLSSGLRLRCEAWNVHGAQSGSILQLPDKKGLIST |
| SEQ ID NO: 489 | QSALTQPRSVSGSPGQSVTISCTGTSSDVGGYNYVSWYQQHPGKAPKLMIY |
| anti-TIM3 HC | DVSKRPSGVPDRFSGSKSGNTASLTISGLQAEDEADYYCSSYADSVVFGGG |
| fused to SIRPa | TKVTVLGQPKAAPSVTLFPPSSEELQANKATLVCLISDFYPGAVTVAWKAD |
| ECD | SSPVKAGVETTTPSKQSNNKYAASSYLSLTPEQWKSHKSYSCQVTHEGSTV |
| | EKTVAPTECSGGGGSGGGGSGGGGSEEELQVIQPDKSVLVAAGETATLRCT |
| | ATSLIPVGPIQWFRGAGPGRELIYNQKEGHFPRVTTVSDLTKRNNMDFSIRI |
| | GNITPADAGTYYCVKFRKGSPDDVEFKSGAGTELSVRAKPS |
| SEQ ID NO: 490 | QSALTQPRSVSGSPGQSVTISCTGTSSDVGGYNYVSWYQQHPGKAPKLMIY |
| anti-TIM3 HC | DVSKRPSGVPDRFSGSKSGNTASLTISGLQAEDEADYYCSSYADSVVFGGG |
| fused to TGFbR | TKVTVLGQPKAAPSVTLFPPSSEELQANKATLVCLISDFYPGAVTVAWKAD |
| ECD | SSPVKAGVETTTPSKQSNNKYAASSYLSLTPEQWKSHKSYSCQVTHEGSTV |
| | EKTVAPTECSGGGGSGGGGSGGGGSTIPPHVQKSVNNDMIVTDNNGAVKF |
| | PQLCKFCDVRFSTCDNQKSCMSNCSITSICEKPQEVCVAVWRKNDENITLE |
| | TVCHDPKLPYHDFILEDAASPKCIMKEKKKPGETFFMCSCSSDECNDNIIFSE |
| | EYNTSNPD |
| SEQ ID NO: 491 | QSALTQPRSVSGSPGQSVTISCTGTSSDVGGYNYVSWYQQHPGKAPKLMIY |
| anti-TIM3 HC | DVSKRPSGVPDRFSGSKSGNTASLTISGLQAEDEADYYCSSYADSVVFGGG |
| fused to TIM3 | TKVTVLGQPKAAPSVTLFPPSSEELQANKATLVCLISDFYPGAVTVAWKAD |
| ECD | SSPVKAGVETTTPSKQSNNKYAASSYLSLTPEQWKSHKSYSCQVTHEGSTV |
| | EKTVAPTECSGGGGSGGGGSGGGGSSEVEYRAEVGQNAYLPCFYTPAAPG |
| | NLVPVCWGKGACPVFECGNVVLRTDERDVNYWTSRYWLNGDFRKGDVS |
| | LTIENVTLADSGIYCCRIQIPGIMNDEKFNLKLVIKPAKVTPAPTRQRDFTAA |
| | FPRMLTTRGHGPAETQTLGSLPDINLTQISTLANELRDSRLANDLRDSGATI |
| | RIG |
| SEQ ID NO: 492 | QSALTQPRSVSGSPGQSVTISCTGTSSDVGGYNYVSWYQQHPGKAPKLMIY |
| anti-TIM3 HC | DVSKRPSGVPDRFSGSKSGNTASLTISGLQAEDEADYYCSSYADSVVFGGG |
| fused to VEGFR | TKVTVLGQPKAAPSVTLFPPSSEELQANKATLVCLISDFYPGAVTVAWKAD |
| ECD | SSPVKAGVETTTPSKQSNNKYAASSYLSLTPEQWKSHKSYSCQVTHEGSTV |
| | EKTVAPTECSGGGGSGGGGSGGGGSSDTGRPFVEMYSEIPEIIHMTEGRELV |
| | IPCRVTSPNITVTLKKFPLDTLIPDGKRIIWDSRKGFIISNATYKEIGLLTCEAT |
| | VNGHLYKTNYLTHRQTNTIIDVVLSPSHGIELSVGEKLVLNCTARTELNVGI |
| | DFNWEYPSSKHQHKKLVNRDLKTQSGSEMKKFLSTLTIDGVTRSDQGLYT |
| | CAASSGLMTKKNSTFVRVHEK |
| SEQ ID NO: 493 | QVQLQQWGAGLLKPSETLSLTCAVYGGSFSGYYWSWIRQSPEKGLEWIGEI |
| anti-41BB HC | NHGGYVTYNPSLESRVTISVDTSKNQFSLKLSSVTAADTAVYYCARDYGPG |
| fused to BTLA | NYDWYFDLWGRGTLVTVSSASTKGPSVFPLAPCSRSTSESTAALGCLVKD |
| ECD | YFPEPVTVSWNSGALTSGVHTFPAVLQSSGLYSLSSVVTVPSSSLGTKTYTC |
| | NVDHKPSNTKVDKRVESKYGPPCPPCPAPEFLGGPSVFLFPPKPKDTLMISR |
| | TPEVTCVVVDVSQEDPEVQFNWYVDGVEVHNAKTKPREEQFNSTYRVVS |
| | VLTVLHQDWLNGKEYKCKVSNKGLPSSIEKTISKAKGQPREPQVYTLPPSQ |
| | EEMTKNQVSLTCLVKGFYPSDIAVEWESNGQPENNYKTTPPVLDSDGSFFL |
| | YSRLTVDKSRWQEGNVFSCSVMHEALHNHYTQKSLSLSLGKGGGGSGGG |
| | GSGGGGSKESCDVQLYIKRQSEHSILAGDPFELECPVKYCANRPHVTWCKL |
| | NGTTCVKLEDRQTSWKEEKNISFFILHEEPVLPNDNGSYRCSANFQSNLIES |
| | HSTTLYVTDVKSASERPSKDEMAS |
| SEQ ID NO: 494 | EIVLTQSPATLSLSPGERATLSCRASQSVSSYLAWYQQKPGQAPRLLIYDAS |
| anti-41BB LC | NRATGIPARFSGSGSGTDFTLTISSLEPEDFAVYYCQQRSNWPPALTFCGGT |
| fused to PD1 ECD | KVEIKRTVAAPSVFIFPPSDEQLKSGTASVVCLLNNFYPREAKVQWKVDNA |
| | LQSGNSQESVTEQDSKDSTYSLSSTLTLSKADYEKHKVYACEVTHQGLSSP |
| | VTKSFNRGECGGGGSGGGGSGGGGSPGWFLDSPDRPWNPPTFSPALLVVT |
| | EGDNATFTCSFSNTSESFVLNWYRMSPSNQTDKLAAFPEDRSQPGQDCRFR |
| | VTQLPNGRDFHMSVVRARRNDSGTYLCGAISLAPKAQIKESLRAELRVTER |
| | RAEVPTAHPSPSPRPAGQFQTLV |
| SEQ ID NO: 495 | EIVLTQSPATLSLSPGERATLSCRASQSVSSYLAWYQQKPGQAPRLLIYDAS |
| anti-41BB LC | NRATGIPARFSGSGSGTDFTLTISSLEPEDFAVYYCQQRSNWPPALTFCGGT |
| fused to | KVEIKRTVAAPSVFIFPPSDEQLKSGTASVVCLLNNFYPREAKVQWKVDNA |
| SIGLEC10 ECD | LQSGNSQESVTEQDSKDSTYSLSSTLTLSKADYEKHKVYACEVTHQGLSSP |
| | VTKSFNRGECGGGGSGGGGSGGGGSMDGRFWIRVQESVMVPEGLCISVPC |
| | SFSYPRQDWTGSTPAYGYWFKAVTETTKGAPVATNHQSREVEMSTRGRFQ |
| | LTGDPAKGNCSLVIRDAQMQDESQYFFRVERGSYVRYNFMNDGFFLKVTA |
| | LTQKPDVYIPETLEPGQPVTVICVFNWAFEECPPPSFSWTGAALSSQGTKPT |
| | TSHFSVLSFTPRPQDHNTDLTCHVDFSRKGVSAQRTVRLRVAYAPRDLVISI |
| | SRDNTPALEPQPQGNVPYLEAQKGQFLRLLCAADSQPPATLSWVLQNRVL |
| | SSSHPWGPRPLGLELPGVKAGDSGRYTCRAENRLGSQQRALDLSVQYPPEN |
| | LRVMVSQANRTVLENLGNGTSLPVLEGQSLCLVCVTHSSPPARLSWTQRG |
| | QVLSPSQPSDPGVLELPRVQVEHEGEFTCHARHPLGSQHVSLSLSVHYSPKL |
| | LGPSCSWEAEGLHCSCSSQASPAPSLRWWLGEELLEGNSSQDSFEVTPSSA |
| | GPWANSSLSLHGGLSSGLRLRCEAWNVHGAQSGSILQLPDKKGLIST |
| SEQ ID NO: 496 | EIVLTQSPATLSLSPGERATLSCRASQSVSSYLAWYQQKPGQAPRLLIYDAS |
| anti-41BB LC | NRATGIPARFSGSGSGTDFTLTISSLEPEDFAVYYCQQRSNWPPALTFCGGT |
| fused to SIRPa | KVEIKRTVAAPSVFIFPPSDEQLKSGTASVVCLLNNFYPREAKVQWKVDNA |
| ECD | LQSGNSQESVTEQDSKDSTYSLSSTLTLSKADYEKHKVYACEVTHQGLSSP |
| | VTKSFNRGECGGGGSGGGGSGGGGSEEELQVIQPDKSVLVAAGETATLRC |
| | TATSLIPVGPIQWFRGAGPGRELIYNQKEGHFPRVTTVSDLTKRNNMDFSIR |
| | IGNITPADAGTYYCVKFRKGSPDDVEFKSGAGTELSVRAKPS |
| SEQ ID NO: 497 | EIVLTQSPATLSLSPGERATLSCRASQSVSSYLAWYQQKPGQAPRLLIYDAS |
| anti-41BB LC | NRATGIPARFSGSGSGTDFTLTISSLEPEDFAVYYCQQRSNWPPALTFCGGT |
| fused to TIM3 | KVEIKRTVAAPSVFIFPPSDEQLKSGTASVVCLLNNFYPREAKVQWKVDNA |
| ECD | LQSGNSQESVTEQDSKDSTYSLSSTLTLSKADYEKHKVYACEVTHQGLSSP |
| | VTKSFNRGECGGGGSGGGGSGGGGSSEVEYRAEVGQNAYLPCFYTPAAPG |
| | NLVPVCWGKGACPVFECGNVVLRTDERDVNYWTSRYWLNGDFRKGDVS |
| | LTIENVTLADSGIYCCRIQIPGIMNDEKFNLKLVIKPAKVTPAPTRQRDFTAA |
| | FPRMLTTRGHGPAETQTLGSLPDINLTQISTLANELRDSRLANDLRDSGATT |
| | RIG |
| SEQ ID NO: 498 | QVQLQQWGAGLLKPSETLSLTCAVYGGSFSGYYWSWIRQSPEKGLEWIGEI |
| anti-41BB HC | NHGGYVTYNPSLESRVTISVDTSKNQFSLKLSSVTAADTAVYYCARDYGPG |
| fused to PD1 ECD | NYDWYFDLWGRGTLVTVSSASTKGPSVFPLAPCSRSTSESTAALGCLVKD |
| | YFPEPVTVSWNSGALTSGVHTFPAVLQSSGLYSLSSVVTVPSSSLGTKTYTC |
| | NVDHKPSNTKVDKRVESKYGPPCPPCPAPEFLGGPSVFLFPPKPKDTLMISR |
| | TPEVTCVVVDVSQEDPEVQFNWYVDGVEVHNAKTKPREEQFNSTYRVVS |
| | VLTVLHQDWLNGKEYKCKVSNKGLPSSIEKTISKAKGQPREPQVYTLPPSQ |
| | EEMTKNQVSLTCLVKGFYPSDIAVEWESNGQPENNYKTTPPVLDSDGSFFL |
| | YSRLTVDKSRWQEGNVFSCSVMHEALHNHYTQKSLSLSLGKGGGGSGGG |
| | GSGGGGSPGWFLDSPDRPWNPPTFSPALLVVTEGDNATFTCSFSNTSESFVL |
| | NWYRMSPSNQTDKLAAFPEDRSQPGQDCRFRVTQLPNGRDFHMSVVRAR |
| | RNDSGTYLCGAISLAPKAQIKESLRAELRVTERRAEVPTAHPSPSPRPAGQF |
| | QTLV |
| SEQ ID NO: 499 | EIVLTQSPATLSLSPGERATLSCRASQSVSSYLAWYQQKPGQAPRLLIYDAS |
| anti-41BB LC | NRATGIPARFSGSGSGTDFTLTISSLEPEDFAVYYCQQRSNWPPALTFCGGT |
| fused to BTLA | KVEIKRTVAAPSVFIFPPSDEQLKSGTASVVCLLNNFYPREAKVQWKVDNA |
| ECD | LQSGNSQESVTEQDSKDSTYSLSSTLTLSKADYEKHKVYACEVTHQGLSSP |
| | VTKSFNRGECGGGGSGGGGSGGGGSKESCDVQLYIKRQSEHSILAGDPFEL |
| | ECPVKYCANRPHVTWCKLNGTTCVKLEDRQTSWKEEKNISFFILHFEPVLP |
| | NDNGSYRCSANFQSNLIESHSTTLYVTDVKSASERPSKDEMAS |
| SEQ ID NO: 500 | QVQLQQWGAGLLKPSETLSLTCAVYGGSFSGYYWSWIRQSPEKGLEWIGEI |
| anti-41BB HC | NHGGYVTYNPSLESRVTISVDTSKNQFSLKLSSVTAADTAVYYCARDYGPG |
| fused to | NYDWYFDLWGRGTLVTVSSASTKGPSVFPLAPCSRSTSESTAALGCLVKD |
| SIGLEC10 ECD | YFPEPVTVSWNSGALTSGVHTFPAVLQSSGLYSLSSVVTVPSSSLGTKTYTC |
| | NVDHKPSNTKVDKRVESKYGPPCPPCPAPEFLGGPSVFLFPPKPKDTLMISR |
| | TPEVTCVVVDVSQEDPEVQFNWYVDGVEVHNAKTKPREEQFNSTYRVVS |
| | VLTVLHQDWLNGKEYKCKVSNKGLPSSIEKTISKAKGQPREPQVYTLPPSQ |
| | EEMTKNQVSLTCLVKGFYPSDIAVEWESNGQPENNYKTTPPVLDSDGSFFL |
| | YSRLTVDKSRWQEGNVFSCSVMHEALHNHYTQKSLSLSLGKGGGGSGGG |
| | GSGGGGSMDGRFWIRVQESVMVPEGLCISVPCSFSYPRQDWTGSTPAYGY |
| | WFKAVTETTKGAPVATNHQSREVEMSTRGRFQLTGDPAKGNCSLVIRDAQ |
| | MQDESQYFFRVERGSYVRYNFMNDGFFLKVTALTQKPDVYIPETLEPGQP |
| | VTVICVFNWAFEECPPPSFSWTGAALSSQGTKPTTSHFSVLSFTPRPQDHNT |
| | DLTCHVDFSRKGVSAQRTVRLRVAYAPRDLVISISRDNTPALEPQPQGNVP |
| | YLEAQKGQFLRLLCAADSQPPATLSWVLQNRVLSSSHPWGPRPLGLELPGV |
| | KAGDSGRYTCRAENRLGSQQRALDLSVQYPPENLRVMVSQANRTVLENL |
| | GNGTSLPVLEGQSLCLVCVTHSSPPARLSWTQRGQVLSPSQPSDPGVLELPR |
| | VQVEHEGEFTCHARHPLGSQHVSLSLSVHYSPKLLGPSCSWEAEGLHCSCS |
| | SQASPAPSLRWWLGEELLEGNSSQDSFEVTPSSAGPWANSSLSLHGGLSSG |
| | LRLRCEAWNVHGAQSGSILQLPDKKGLIST |
| SEQ ID NO: 501 | QVQLQQWGAGLLKPSETLSLTCAVYGGSFSGYYWSWIRQSPEKGLEWIGEI |
| anti-41BB HC | NHGGYVTYNPSLESRVTISVDTSKNQFSLKLSSVTAADTAVYYCARDYGPG |
| fused to SIRPa | NYDWYFDLWGRGTLVTVSSASTKGPSVFPLAPCSRSTSESTAALGCLVKD |
| EC | YFPEPVTVSWNSGALTSGVHTFPAVLQSSGLYSLSSVVTVPSSSLGTKTYTC |
| | NVDHKPSNTKVDKRVESKYGPPCPPCPAPEFLGGPSVFLFPPKPKDTLMISR |
| | TPEVTCVVVDVSQEDPEVQFNWYVDGVEVHNAKTKPREEQFNSTYRVVS |
| | VLTVLHQDWLNGKEYKCKVSNKGLPSSIEKTISKAKGQPREPQVYTLPPSQ |
| | EEMTKNQVSLTCLVKGFYPSDIAVEWESNGQPENNYKTTPPVLDSDGSFFL |
| | YSRLTVDKSRWQEGNVFSCSVMHEALHNHYTQKSLSLSLGKGGGGSGGG |
| | GSGGGGSEEELQVIQPDKSVLVAAGETATLRCTATSLIPVGPIQWFRGAGPG |
| | RELIYNQKEGHFPRVTTVSDLTKRNNMDFSIRIGNITPADAGTYYCVKFRK |
| | GSPDDVEFKSGAGTELSVRAKPS |
| SEQ ID NO: 502 | QVQLQQWGAGLLKPSETLSLTCAVYGGSFSGYYWSWIRQSPEKGLEWIGEI |
| anti-41BB HC | NHGGYVTYNPSLESRVTISVDTSKNQFSLKLSSVTAADTAVYYCARDYGPG |
| fused to TGFbR | NYDWYFDLWGRGTLVTVSSASTKGPSVFPLAPCSRSTSESTAALGCLVKD |
| ECD | YFPEPVTVSWNSGALTSGVHTFPAVLQSSGLYSLSSVVTVPSSSLGTKTYTC |
| | NVDHKPSNTKVDKRVESKYGPPCPPCPAPEFLGGPSVFLFPPKPKDTLMISR |
| | TPEVTCVVVDVSQEDPEVQFNWYVDGVEVHNAKTKPREEQFNSTYRVVS |
| | VLTVLHQDWLNGKEYKCKVSNKGLPSSIEKTISKAKGQPREPQVYTLPPSQ |
| | EEMTKNQVSLTCLVKGFYPSDIAVEWESNGQPENNYKTTPPVLDSDGSFFL |
| | YSRLTVDKSRWQEGNVFSCSVMHEALHNHYTQKSLSLSLGKGGGGSGGG |
| | GSGGGGSTIPPHVQKSVNNDMIVTDNNGAVKFPQLCKFCDVRFSTCDNQK |
| | SCMSNCSITSICEKPQEVCVAVWRKNDENITLETVCHDPKLPYHDFILEDAA |
| | SPKCIMKEKKKPGETFFMCSCSSDECNDNIIFSEEYNTSNPD |
| SEQ ID NO: 503 | QVQLQQWGAGLLKPSETLSLTCAVYGGSFSGYYWSWIRQSPEKGLEWIGEI |
| anti-41BB HC | NHGGYVTYNPSLESRVTISVDTSKNQFSLKLSSVTAADTAVYYCARDYGPG |
| fused to TIM3 | NYDWYFDLWGRGTLVTVSSASTKGPSVFPLAPCSRSTSESTAALGCLVKD |
| ECD | YFPEPVTVSWNSGALTSGVHTFPAVLQSSGLYSLSSVVTVPSSSLGTKTYTC |
| | NVDHKPSNTKVDKRVESKYGPPCPPCPAPEFLGGPSVFLFPPKPKDTLMISR |
| | TPEVTCVVVDVSQEDPEVQFNWYVDGVEVHNAKTKPREEQFNSTYRVVS |
| | VLTVLHQDWLNGKEYKCKVSNKGLPSSIEKTISKAKGQPREPQVYTLPPSQ |
| | EEMTKNQVSLTCLVKGFYPSDIAVEWESNGQPENNYKTTPPVLDSDGSFFL |
| | YSRLTVDKSRWQEGNVFSCSVMHEALHNHYTQKSLSLSLGKGGGGSGGG |
| | GSGGGGSSEVEYRAEVGQNAYLPCFYTPAAPGNLVPVCWGKGACPVFECG |
| | NVVLRTDERDVNYWTSRYWLNGDFRKGDVSLTIENVTLADSGIYCCRIQIP |
| | GIMNDEKFNLKLVIKPAKVTPAPTRQRDFTAAFPRMLTTRGHGPAETQTLG |
| | SLPDINLTQISTLANELRDSRLANDLRDSGATIRIG |
| SEQ ID NO: 504 | QVQLQQWGAGLLKPSETLSLTCAVYGGSFSGYYWSWIRQSPEKGLEWIGEI |
| anti-41BB HC | NHGGYVTYNPSLESRVTISVDTSKNQFSLKLSSVTAADTAVYYCARDYGPG |
| fused to VEGFR | NYDWYFDLWGRGTLVTVSSASTKGPSVFPLAPCSRSTSESTAALGCLVKD |
| ECD | YFPEPVTVSWNSGALTSGVHTFPAVLQSSGLYSLSSVVTVPSSSLGTKTYTC |
| | NVDHKPSNTKVDKRVESKYGPPCPPCPAPEFLGGPSVFLFPPKPKDTLMISR |
| | TPEVTCVVVDVSQEDPEVQFNWYVDGVEVHNAKTKPREEQFNSTYRVVS |
| | VLTVLHQDWLNGKEYKCKVSNKGLPSSIEKTISKAKGQPREPQVYTLPPSQ |
| | EEMTKNQVSLTCLVKGFYPSDIAVEWESNGQPENNYKTTPPVLDSDGSFFL |
| | YSRLTVDKSRWQEGNVFSCSVMHEALHNHYTQKSLSLSLGKGGGGSGGG |
| | GSGGGGSSDTGRPFVEMYSEIPEIIHMTEGRELVIPCRVTSPNITVTLKKFPL |
| | DTLIPDGKRIIWDSRKGFIISNATYKEIGLLTCEATVNGHLYKTNYLTHRQT |
| | NTIIDVVLSPSHGIELSVGEKLVLNCTARTELNVGIDFNWEYPSSKHQHKKL |
| | VNRDLKTQSGSEMKKFLSTLTIDGVTRSDQGLYTCAASSGLMTKKNSTFVR |
| | VHEK |
| SEQ ID NO: 505 | QVQLVQSGSELKKPGASVKVSCKASGYTFTDYSMHWVRQAPGQGLKWM |
| anti-OX40 HC | GWINTETGEPTYADDFKGRFVFSLDTSVSTAYLQISSLKAEDTAVYYCANP |
| fused to BTLA | YYDYVSYYAMDYWGOGTTVTVSSASTKGPSVFPLAPSSKSTSGGTAALGC |
| ECD | LVKDYFPEPVTVSWNSGALTSGVHTFPAVLQSSGLYSLSSVVTVPSSSLGTQ |
| | TYICNVNHKPSNTKVDKKVEPKSCDKTHTCPPCPAPEAAGGPSVFLFPPKP |
| | KDTLMISRTPEVTCVVVDVSHEDPEVKFNWYVDGVEVHNAKTKPREEQY |
| | NSTYRVVSVLTVLHQDWLNGKEYKCKVSNKALPAPIEKTISKAKGQPREP |
| | QVYTLPPSREEMTKNQVSLTCLVKGFYPSDIAVEWESNGQPENNYKFIPPV |
| | LDSDGSFFLYSKLTVDKSRWQQGNVFSCSVMHEALHNHYTQKSLSLSPGK |
| | GGGGSGGGGSGGGGSKESCDVQLYIKRQSEHSILAGDPFELECPVKYCANR |
| | PHVTWCKLNGTTCVKLEDRQTSWKEEKNISFFILHEEPVLPNDNGSYRCSA |
| | NFQSNLIESHSTTLYVTDVKSASERPSKDEMAS |
| SEQ ID NO: 506 | DIQMTQSPSSLSASVGDRVTITCKASQDVSTAVAWYQQKPGKAPKLLIYSA |
| anti-OX40 LC | SYLYTGVPSRFSGSGSGTDFTFTISSLQPEDIATYYCOQHYSTPRTFGQGTKL |
| fused to PD1 ECD | EIKRTVAAPSVFIFPPSDEQLKSGTASVVCLLNNFYPREAKVQWKVDNALQ |
| | SGNSQESVTEQDSKDSTYSLSSTLTLSKADYEKHKVYACEVTHQGLSSPVT |
| | KSFNRGECGGGGSGGGGSGGGGSPGWFLDSPDRPWNPPTFSPALLVVTEG |
| | DNATFTCSFSNTSESFVLNWYRMSPSNQTDKLAAFPEDRSQPGQDCRFRVT |
| | QLPNGRDFHMSVVRARRNDSGTYLCGAISLAPKAQIKESLRAELRVTERRA |
| | EVPTAHPSPSPRPAGQFQTLV |
| SEQ ID NO: 507 | DIQMTQSPSSLSASVGDRVTITCKASQDVSTAVAWYQQKPGKAPKLLIYSA |
| anti-OX40 LC | SYLYTGVPSRFSGSGSGTDFTFTISSLQPEDIATYYCOQHYSTPRTFGQGTKL |
| fused to | EIKRTVAAPSVFIFPPSDEQLKSGTASVVCLLNNFYPREAKVQWKVDNALQ |
| SIGLEC10 ECD | SGNSQESVTEQDSKDSTYSLSSTLTLSKADYEKHKVYACEVTHQGLSSPVT |
| | KSFNRGECGGGGSGGGGSGGGGSMDGRFWIRVQESVMVPEGLCISVPCSF |
| | SYPRQDWTGSTPAYGYWFKAVTETTKGAPVATNHQSREVEMSTRGRFQL |
| | TGDPAKGNCSLVIRDAQMQDESQYFFRVERGSYVRYNFMNDGFFLKVTAL |
| | TQKPDVYIPETLEPGQPVTVICVFNWAFEECPPPSFSWTGAALSSQGTKPTT |
| | SHFSVLSFTPRPQDHNTDLTCHVDFSRKGVSAQRTVRLRVAYAPRDLVISIS |
| | RDNTPALEPQPQGNVPYLEAQKGQFLRLLCAADSQPPATLSWVLQNRVLS |
| | SSHPWGPRPLGLELPGVKAGDSGRYTCRAENRLGSQQRALDLSVQYPPEN |
| | LRVMVSQANRTVLENLGNGTSLPVLEGQSLCLVCVTHSSPPARLSWTQRG |
| | QVLSPSQPSDPGVLELPRVQVEHEGEFTCHARHPLGSQHVSLSLSVHYSPKL |
| | LGPSCSWEAEGLHCSCSSQASPAPSLRWWLGEELLEGNSSQDSFEVTPSSA |
| | GPWANSSLSLHGGLSSGLRLRCEAWNVHGAQSGSILQLPDKKGLIST |
| SEQ ID NO: 508 | DIQMTQSPSSLSASVGDRVTITCKASQDVSTAVAWYQQKPGKAPKLLIYSA |
| anti-OX40 LC | SYLYTGVPSRFSGSGSGTDFTFTISSLQPEDIATYYCOQHYSTPRTFGQGTKL |
| fused to SIRPa | EIKRTVAAPSVFIFPPSDEQLKSGTASVVCLLNNFYPREAKVQWKVDNALQ |
| ECD | SGNSQESVTEQDSKDSTYSLSSTLTLSKADYEKHKVYACEVTHQGLSSPVT |
| | KSFNRGECGGGGSGGGGSGGGGSEEELQVIQPDKSVLVAAGETATLRCTA |
| | TSLIPVGPIQWFRGAGPGRELIYNQKEGHFPRVTTVSDLTKRNNMDFSIRIG |
| | NITPADAGTYYCVKFRKGSPDDVEFKSGAGTELSVRAKPS |
| SEQ ID NO: 509 | DIQMTQSPSSLSASVGDRVTITCKASQDVSTAVAWYQQKPGKAPKLLIYSA |
| anti-OX40 LC | SYLYTGVPSRFSGSGSGTDFTFTISSLQPEDIATYYCOQHYSTPRTFGQGTKL |
| fused to TIM3 | EIKRTVAAPSVFIFPPSDEQLKSGTASVVCLLNNFYPREAKVQWKVDNALQ |
| ECD | SGNSQESVTEQDSKDSTYSLSSTLTLSKADYEKHKVYACEVTHQGLSSPVT |
| | KSFNRGECGGGGSGGGGSGGGGSSEVEYRAEVGQNAYLPCFYTPAAPGNL |
| | VPVCWGKGACPVFECGNVVLRTDERDVNYWTSRYWLNGDFRKGDVSLTI |
| | ENVTLADSGIYCCRIQIPGIMNDEKFNLKLVIKPAKVTPAPTRQRDFTAAFP |
| | RMLTTRGHGPAETQTLGSLPDINLTQISTLANELRDSRLANDLRDSGATIRI |
| | G |
| SEQ ID NO: 510 | QVQLVQSGSELKKPGASVKVSCKASGYTFTDYSMHWVRQAPGQGLKWM |
| anti-OX40 HC | GWINTETGEPTYADDFKGRFVFSLDTSVSTAYLQISSLKAEDTAVYYCANP |
| fused to PD1 ECD | YYDYVSYYAMDYWGOGTTVTVSSASTKGPSVFPLAPSSKSTSGGTAALGC |
| | LVKDYFPEPVTVSWNSGALTSGVHTFPAVLQSSGLYSLSSVVTVPSSSLGTQ |
| | TYICNVNHKPSNTKVDKKVEPKSCDKTHTCPPCPAPEAAGGPSVFLFPPKP |
| | KDTLMISRTPEVTCVVVDVSHEDPEVKFNWYVDGVEVHNAKTKPREEQY |
| | NSTYRVVSVLTVLHQDWLNGKEYKCKVSNKALPAPIEKTISKAKGQPREP |
| | QVYTLPPSREEMTKNQVSLTCLVKGFYPSDIAVEWESNGQPENNYKTTPPV |
| | LDSDGSFFLYSKLTVDKSRWQQGNVFSCSVMHEALHNHYTQKSLSLSPGK |
| | GGGGSGGGGSGGGGSPGWFLDSPDRPWNPPTFSPALLVVTEGDNATFTCSF |
| | SNTSESFVLNWYRMSPSNQTDKLAAFPEDRSQPGQDCRFRVTQLPNGRDF |
| | HMSVVRARRNDSGTYLCGAISLAPKAQIKESLRAELRVTERRAEVPTAHPS |
| | PSPRPAGQFQTLV |
| SEQ ID NO: 511 | DIQMTQSPSSLSASVGDRVTITCKASQDVSTAVAWYQQKPGKAPKLLIYSA |
| anti-OX40 LC | SYLYTGVPSRFSGSGSGTDFTFTISSLQPEDIATYYCOQHYSTPRTFGQGTKL |
| fused to BTLA | EIKRTVAAPSVFIFPPSDEQLKSGTASVVCLLNNFYPREAKVQWKVDNALQ |
| ECD | SGNSQESVTEQDSKDSTYSLSSTLTLSKADYEKHKVYACEVTHQGLSSPVT |
| | KSFNRGECGGGGSGGGGSGGGGSKESCDVQLYIKRQSEHSILAGDPFELEC |
| | PVKYCANRPHVTWCKLNGTTCVKLEDRQTSWKEEKNISFFILHFEPVLPND |
| | NGSYRCSANFQSNLIESHSTTLYVTDVKSASERPSKDEMAS |
| SEQ ID NO: 512 | QVQLVQSGSELKKPGASVKVSCKASGYTFTDYSMHWVRQAPGQGLKWM |
| anti-OX40 HC | GWINTETGEPTYADDFKGRFVFSLDTSVSTAYLQISSLKAEDTAVYYCANP |
| fused to | YYDYVSYYAMDYWGOGTTVTVSSASTKGPSVFPLAPSSKSTSGGTAALGC |
| SIGLEC10 ECD | LVKDYFPEPVTVSWNSGALTSGVHTFPAVLQSSGLYSLSSVVTVPSSSLGTQ |
| | TYICNVNHKPSNTKVDKKVEPKSCDKTHTCPPCPAPEAAGGPSVFLFPPKP |
| | KDTLMISRTPEVTCVVVDVSHEDPEVKFNWYVDGVEVHNAKTKPREEQY |
| | NSTYRVVSVLTVLHQDWLNGKEYKCKVSNKALPAPIEKTISKAKGQPREP |
| | QVYTLPPSREEMTKNQVSLTCLVKGFYPSDIAVEWESNGQPENNYKTTPPV |
| | LDSDGSFFLYSKLTVDKSRWQQGNVFSCSVMHEALHNHYTQKSLSLSPGK |
| | GGGGSGGGGSGGGGSMDGRFWIRVQESVMVPEGLCISVPCSFSYPRQDWT |
| | GSTPAYGYWFKAVTETTKGAPVATNHQSREVEMSTRGRFQLTGDPAKGN |
| | CSLVIRDAQMQDESQYFFRVERGSYVRYNFMNDGFFLKVTALTQKPDVYI |
| | PETLEPGQPVTVICVFNWAFEECPPPSFSWTGAALSSQGTKPTTSHFSVLSFT |
| | PRPQDHNTDLTCHVDFSRKGVSAQRTVRLRVAYAPRDLVISISRDNTPALE |
| | PQPQGNVPYLEAQKGQFLRLLCAADSQPPATLSWVLQNRVLSSSHPWGPR |
| | PLGLELPGVKAGDSGRYTCRAENRLGSQQRALDLSVQYPPENLRVMVSQA |
| | NRTVLENLGNGTSLPVLEGQSLCLVCVTHSSPPARLSWTQRGQVLSPSQPS |
| | DPGVLELPRVQVEHEGEFTCHARHPLGSQHVSLSLSVHYSPKLLGPSCSWE |
| | AEGLHCSCSSQASPAPSLRWWLGEELLEGNSSQDSFEVTPSSAGPWANSSL |
| | SLHGGLSSGLRLRCEAWNVHGAQSGSILQLPDKKGLIST |
| SEQ ID NO: 513 | QVQLVQSGSELKKPGASVKVSCKASGYTFTDYSMHWVRQAPGQGLKWM |
| anti-OX40 HC | GWINTETGEPTYADDFKGRFVFSLDTSVSTAYLQISSLKAEDTAVYYCANP |
| fused to SIRPa | YYDYVSYYAMDYWGOGTTVTVSSASTKGPSVFPLAPSSKSTSGGTAALGC |
| ECD | LVKDYFPEPVTVSWNSGALTSGVHTFPAVLQSSGLYSLSSVVTVPSSSLGTQ |
| | TYICNVNHKPSNTKVDKKVEPKSCDKTHTCPPCPAPEAAGGPSVFLFPPKP |
| | KDTLMISRTPEVTCVVVDVSHEDPEVKFNWYVDGVEVHNAKTKPREEQY |
| | NSTYRVVSVLTVLHQDWLNGKEYKCKVSNKALPAPIEKTISKAKGQPREP |
| | QVYTLPPSREEMTKNQVSLTCLVKGFYPSDIAVEWESNGQPENNYKTTPPV |
| | LDSDGSFFLYSKLTVDKSRWQQGNVFSCSVMHEALHNHYTQKSLSLSPGK |
| | GGGGSGGGGSGGGGSEEELQVIQPDKSVLVAAGETATLRCTATSLIPVGPIQ |
| | WFRGAGPGRELIYNQKEGHFPRVTTVSDLTKRNNMDFSIRIGNITPADAGT |
| | YYCVKFRKGSPDDVEFKSGAGTELSVRAKPS |
| SEQ ID NO: 514 | QVQLVQSGSELKKPGASVKVSCKASGYTFTDYSMHWVRQAPGQGLKWM |
| anti-OX40 HC | GWINTETGEPTYADDFKGRFVFSLDTSVSTAYLQISSLKAEDTAVYYCANP |
| fused to TGFbR | YYDYVSYYAMDYWGOGTTVTVSSASTKGPSVFPLAPSSKSTSGGTAALGC |
| ECD | LVKDYFPEPVTVSWNSGALTSGVHTFPAVLQSSGLYSLSSVVTVPSSSLGTQ |
| | TYICNVNHKPSNTKVDKKVEPKSCDKTHTCPPCPAPEAAGGPSVFLFPPKP |
| | KDTLMISRTPEVTCVVVDVSHEDPEVKFNWYVDGVEVHNAKTKPREEQY |
| | NSTYRVVSVLTVLHQDWLNGKEYKCKVSNKALPAPIEKTISKAKGQPREP |
| | QVYTLPPSREEMTKNQVSLTCLVKGFYPSDIAVEWESNGQPENNYKTTPPV |
| | LDSDGSFFLYSKLTVDKSRWQQGNVFSCSVMHEALHNHYTQKSLSLSPGK |
| | GGGGSGGGGSGGGGSTIPPHVQKSVNNDMIVTDNNGAVKFPQLCKFCDVR |
| | FSTCDNQKSCMSNCSITSICEKPQEVCVAVWRKNDENITLETVCHDPKLPY |
| | HDFILEDAASPKCIMKEKKKPGETFFMCSCSSDECNDNIIFSEEYNTSNPD |
| SEQ ID NO: 515 | QVQLVQSGSELKKPGASVKVSCKASGYTFTDYSMHWVRQAPGQGLKWM |
| anti-OX40 HC | GWINTETGEPTYADDFKGRFVFSLDTSVSTAYLQISSLKAEDTAVYYCANP |
| fused to TIM3 | YYDYVSYYAMDYWGOGTTVTVSSASTKGPSVFPLAPSSKSTSGGTAALGC |
| ECD | LVKDYFPEPVTVSWNSGALTSGVHTFPAVLQSSGLYSLSSVVTVPSSSLGTQ |
| | TYICNVNHKPSNTKVDKKVEPKSCDKTHTCPPCPAPEAAGGPSVFLFPPKP |
| | KDTLMISRTPEVTCVVVDVSHEDPEVKFNWYVDGVEVHNAKTKPREEQY |
| | NSTYRVVSVLTVLHQDWLNGKEYKCKVSNKALPAPIEKTISKAKGQPREP |
| | QVYTLPPSREEMTKNQVSLTCLVKGFYPSDIAVEWESNGQPENNYKTTPPV |
| | LDSDGSFFLYSKLTVDKSRWQQGNVFSCSVMHEALHNHYTQKSLSLSPGK |
| | GGGGSGGGGSGGGGSSEVEYRAEVGQNAYLPCFYTPAAPGNLVPVCWGK |
| | GACPVFECGNVVLRTDERDVNYWTSRYWLNGDFRKGDVSLTIENVTLADS |
| | GIYCCRIQIPGIMNDEKFNLKLVIKPAKVTPAPTRQRDFTAAFPRMLTTRGH |
| | GPAETQTLGSLPDINLTQISTLANELRDSRLANDLRDSGATIRIG |
| SEQ ID NO: 516 | QVQLVQSGSELKKPGASVKVSCKASGYTFTDYSMHWVRQAPGQGLKWM |
| anti-OX40 HC | GWINTETGEPTYADDFKGRFVFSLDTSVSTAYLQISSLKAEDTAVYYCANP |
| fused to VEGFR | YYDYVSYYAMDYWGOGTTVTVSSASTKGPSVFPLAPSSKSTSGGTAALGC |
| ECD | LVKDYFPEPVTVSWNSGALTSGVHTFPAVLQSSGLYSLSSVVTVPSSSLGTQ |
| | TYICNVNHKPSNTKVDKKVEPKSCDKTHTCPPCPAPEAAGGPSVFLFPPKP |
| | KDTLMISRTPEVTCVVVDVSHEDPEVKFNWYVDGVEVHNAKTKPREEQY |
| | NSTYRVVSVLTVLHQDWLNGKEYKCKVSNKALPAPIEKTISKAKGQPREP |
| | QVYTLPPSREEMTKNQVSLTCLVKGFYPSDIAVEWESNGQPENNYKTTPPV |
| | LDSDGSFFLYSKLTVDKSRWQQGNVFSCSVMHEALHNHYTQKSLSLSPGK |
| | GGGGSGGGGSGGGGSSDTGRPFVEMYSEIPEIIHMTEGRELVIPCRVTSPNIT |
| | VTLKKFPLDTLIPDGKRIIWDSRKGFIISNATYKEIGLLTCEATVNGHLYKTN |
| | YLTHRQTNTIIDVVLSPSHGIELSVGEKLVLNCTARTELNVGIDFNWEYPSS |
| | KHQHKKLVNRDLKTQSGSEMKKFLSTLTIDGVTRSDQGLYTCAASSGLMT |
| | KKNSTFVRVHEK |
| SEQ ID NO: 517 | QVQLVQSGAEVKKPGSSVKVSCKASGYTFTDYAMHWVRQAPGQGLEWM |
| anti-ICOS HC | GLISIYSDHTNYNQKFQGRVTITADKSTSTAYMELSSLRSEDTAVYYCGRN |
| fused to BTLA | NYGNYGWYFDVWGQGTTVTVSSGGGGSGGGGSGGGGSKESCDVQLYIKR |
| ECD | QSEHSILAGDPFELECPVKYCANRPHVTWCKLNGTTCVKLEDRQTSWKEE |
| | KNISFFILHFEPVLPNDNGSYRCSANFQSNLIESHSTTLYVTDVKSASERPSK |
| | DEMAS |
| SEQ ID NO: 518 | EIVLTQSPATLSLSPGERATLSCSASSSVSYMHWYQQKPGQAPRLLIYDTSK |
| anti-ICOS LC | LASGIPARFSGSGSGTDYTLTISSLEPEDFAVYYCFQGSGYPYTFGOGTKLEI |
| fused to PD1 ECD | KRTVAAPSVFIFPPSDEQLKSGTASVVCLLNNFYPREAKVQWKVDNALQSG |
| | NSQESVTEQDSKDSTYSLSSTLTLSKADYEKHKVYACEVTHQGLSSPVTKS |
| | FNRGECGGGGSGGGGSGGGGSPGWFLDSPDRPWNPPTFSPALLVVTEGDN |
| | ATFTCSFSNTSESFVLNWYRMSPSNQTDKLAAFPEDRSQPGQDCRFRVTQL |
| | PNGRDFHMSVVRARRNDSGTYLCGAISLAPKAQIKESLRAELRVTERRAEV |
| | PTAHPSPSPRPAGQFQTLV |
| SEQ ID NO: 519 | EIVLTQSPATLSLSPGERATLSCSASSSVSYMHWYQQKPGQAPRLLIYDTSK |
| anti-ICOS LC | LASGIPARFSGSGSGTDYTLTISSLEPEDFAVYYCFQGSGYPYTFGOGTKLEI |
| fused to | KRTVAAPSVFIFPPSDEQLKSGTASVVCLLNNFYPREAKVQWKVDNALQSG |
| SIGLEC10 ECD | NSQESVTEQDSKDSTYSLSSTLTLSKADYEKHKVYACEVTHQGLSSPVTKS |
| | FNRGECGGGGSGGGGSGGGGSMDGRFWIRVQESVMVPEGLCISVPCSFSY |
| | PRQDWTGSTPAYGYWFKAVTETTKGAPVATNHQSREVEMSTRGRFQLTG |
| | DPAKGNCSLVIRDAQMQDESQYFFRVERGSYVRYNFMNDGFFLKVTALTQ |
| | KPDVYIPETLEPGQPVTVICVFNWAFEECPPPSFSWTGAALSSQGTKPTTSH |
| | FSVLSFTPRPQDHNTDLTCHVDFSRKGVSAQRTVRLRVAYAPRDLVISISRD |
| | NTPALEPQPQGNVPYLEAQKGQFLRLLCAADSQPPATLSWVLQNRVLSSSH |
| | PWGPRPLGLELPGVKAGDSGRYTCRAENRLGSQQRALDLSVQYPPENLRV |
| | MVSQANRTVLENLGNGTSLPVLEGQSLCLVCVTHSSPPARLSWTQRGQVL |
| | SPSQPSDPGVLELPRVQVEHEGEFTCHARHPLGSQHVSLSLSVHYSPKLLGP |
| | SCSWEAEGLHCSCSSQASPAPSLRWWLGEELLEGNSSQDSFEVTPSSAGPW |
| | ANSSLSLHGGLSSGLRLRCEAWNVHGAQSGSILQLPDKKGLIST |
| SEQ ID NO: 520 | EIVLTQSPATLSLSPGERATLSCSASSSVSYMHWYQQKPGQAPRLLIYDTSK |
| anti-ICOS LC | LASGIPARFSGSGSGTDYTLTISSLEPEDFAVYYCFQGSGYPYTFGOGTKLEI |
| fused to SIRPa | KRTVAAPSVFIFPPSDEQLKSGTASVVCLLNNFYPREAKVQWKVDNALQSG |
| EC | NSQESVTEQDSKDSTYSLSSTLTLSKADYEKHKVYACEVTHQGLSSPVTKS |
| | FNRGECGGGGSGGGGSGGGGSEEELQVIQPDKSVLVAAGETATLRCTATSL |
| | IPVGPIQWFRGAGPGRELIYNQKEGHFPRVTTVSDLTKRNNMDFSIRIGNITP |
| | ADAGTYYCVKFRKGSPDDVEFKSGAGTELSVRAKPS |
| SEQ ID NO: 521 | EIVLTQSPATLSLSPGERATLSCSASSSVSYMHWYQQKPGQAPRLLIYDTSK |
| anti-ICOS LC | LASGIPARFSGSGSGTDYTLTISSLEPEDFAVYYCFQGSGYPYTFGOGTKLEI |
| fused to TIM3 | KRTVAAPSVFIFPPSDEQLKSGTASVVCLLNNFYPREAKVQWKVDNALQSG |
| ECD | NSQESVTEQDSKDSTYSLSSTLTLSKADYEKHKVYACEVTHQGLSSPVTKS |
| | FNRGECGGGGSGGGGSGGGGSSEVEYRAEVGQNAYLPCFYTPAAPGNLVP |
| | VCWGKGACPVFECGNVVLRTDERDVNYWTSRYWLNGDFRKGDVSLTIEN |
| | VTLADSGIYCCRIQIPG1MNDEKFNLKLVIKPAKVTPAPTRQRDFTAAFPRM |
| | LTTRGHGPAETQTLGSLPDINLTQISTLANELRDSRLANDLRDSGATIRIG |
| SEQ ID NO: 522 | QVQLVQSGAEVKKPGSSVKVSCKASGYTFTDYAMHWVRQAPGQGLEWM |
| anti-ICOS HC | GLISIYSDHTNYNQKFQGRVTITADKSTSTAYMELSSLRSEDTAVYYCGRN |
| fused to PD1 ECD | NYGNYGWYFDVWGQGTTVTVSSGGGGSGGGGSGGGGSPGWFLDSPDRP |
| | WNPPTFSPALLVVTEGDNATFTCSFSNTSESFVLNWYRMSPSNQTDKLAAF |
| | PEDRSQPGQDCRFRVTQLPNGRDFHMSVVRARRNDSGTYLCGAISLAPKA |
| | QIKESLRAELRVTERRAEVPTAHPSPSPRPAGQFQTLV |
| SEQ ID NO: 523 | EIVLTQSPATLSLSPGERATLSCSASSSVSYMHWYQQKPGQAPRLLIYDTSK |
| anti-ICOS LC | LASGIPARFSGSGSGTDYTLTISSLEPEDFAVYYCFQGSGYPYTFGOGTKLEI |
| fused to BTLA | KRTVAAPSVFIFPPSDEQLKSGTASVVCLLNNFYPREAKVQWKVDNALQSG |
| ECD | NSQESVTEQDSKDSTYSLSSTLTLSKADYEKHKVYACEVTHQGLSSPVTKS |
| | FNRGECGGGGSGGGGSGGGGSKESCDVQLYIKRQSEHSILAGDPFELECPV |
| | KYCANRPHVTWCKLNGTTCVKLEDRQTSWKEEKNISFFILHFEPVLPNDNG |
| | SYRCSANFQSNLIESHSTTLYVTDVKSASERPSKDEMAS |
| SEQ ID NO: 524 | QVQLVQSGAEVKKPGSSVKVSCKASGYTFTDYAMHWVRQAPGQGLEWM |
| anti-ICOS HC | GLISIYSDHTNYNQKFQGRVTITADKSTSTAYMELSSLRSEDTAVYYCGRN |
| fused to | NYGNYGWYFDVWGQGTTVTVSSGGGGSGGGGSGGGGSMDGRFWIRVQE |
| SIGLEC10 ECD | SVMVPEGLCISVPCSFSYPRQDWTGSTPAYGYWFKAVTETTKGAPVATNH |
| | QSREVEMSTRGRFQLTGDPAKGNCSLVIRDAQMQDESQYFFRVERGSYVR |
| | YNFMNDGFFLKVTALTQKPDVYIPETLEPGQPVTVICVFNWAFEECPPPSFS |
| | WTGAALSSQGTKPTTSHFSVLSFTPRPQDHNTDLTCHVDFSRKGVSAQRTV |
| | RLRVAYAPRDLVISISRDNTPALEPQPQGNVPYLEAQKGQFLRLLCAADSQ |
| | PPATLSWVLQNRVLSSSHPWGPRPLGLELPGVKAGDSGRYTCRAENRLGS |
| | QQRALDLSVQYPPENLRVMVSQANRTVLENLGNGTSLPVLEGQSLCLVCV |
| | THSSPPARLSWTQRGQVLSPSQPSDPGVLELPRVQVEHEGEFTCHARHPLG |
| | SQHVSLSLSVHYSPKLLGPSCSWEAEGLHCSCSSQASPAPSLRWWLGEELL |
| | EGNSSQDSFEVTPSSAGPWANSSLSLHGGLSSGLRLRCEAWNVHGAQSGSI |
| | LQLPDKKGLIST |
| SEQ ID NO: 525 | QVQLVQSGAEVKKPGSSVKVSCKASGYTFTDYAMHWVRQAPGQGLEWM |
| anti-ICOS HC | GUSTYSDHTNYNQKFQGRVTITADKSTSTAYMELSSLRSEDTAVYYCGRN |
| fused to SIRPa | NYGNYGWYFDVWGQGTTVTVSSGGGGSGGGGSGGGGSEEELQVIQPDKS |
| ECD | VLVAAGETATLRCTATSLIPVGPIQWFRGAGPGRELIYNQKEGHFPRVTTVS |
| | DLTKRNNMDFSIRIGNITPADAGTYYCVKFRKGSPDDVEFKSGAGTELSVR |
| | AKPS |
| SEQ ID NO: 526 | QVQLVQSGAEVKKPGSSVKVSCKASGYTFTDYAMHWVRQAPGQGLEWM |
| anti-ICOS HC | GLISIYSDHTNYNQKFQGRVTITADKSTSTAYMELSSLRSEDTAVYYCGRN |
| fused to TGFbR | NYGNYGWYFDVWGQGTTVTVSSGGGGSGGGGSGGGGSTIPPHVQKSVNN |
| ECD | DMIVTDNNGAVKFPQLCKFCDVRFSTCDNQKSCMSNCSITSICEKPQEVCV |
| | AVWRKNDENITLETVCHDPKLPYHDFILEDAASPKCIMKEKKKPGETFFMC |
| | SCSSDECNDNIIFSEEYNTSNPD |
| SEQ ID NO: 527 | QVQLVQSGAEVKKPGSSVKVSCKASGYTFTDYAMHWVRQAPGQGLEWM |
| anti-ICOS HC | GLISIYSDHTNYNQKFQGRVTITADKSTSTAYMELSSLRSEDTAVYYCGRN |
| fused to TIM3 | NYGNYGWYFDVWGQGTTVTVSSGGGGSGGGGSGGGGSSEVEYRAEVGQ |
| ECD | NAYLPCFYTPAAPGNLVPVCWGKGACPVFECGNVVLRTDERDVNYWTSR |
| | YWLNGDFRKGDVSLTIENVTLADSGIYCCRIQIPGIMNDEKFNLKLVIKPAK |
| | VTPAPTRQRDFTAAFPRMLTTRGHGPAETQTLGSLPDINLTQISTLANELRD |
| | SRLANDLRDSGATIRIG |
| SEQ ID NO: 528 | QVQLVQSGAEVKKPGSSVKVSCKASGYTFTDYAMHWVRQAPGQGLEWM |
| anti-ICOS HC | GLISIYSDHTNYNQKFQGRVTITADKSTSTAYMELSSLRSEDTAVYYCGRN |
| fused to VEGFR | NYGNYGWYFDVWGQGTTVTVSSGGGGSGGGGSGGGGSSDTGRPFVEMY |
| ECD | SEIPEIIHMTEGRELVIPCRVTSPNITVTLKKFPLDTLIPDGKRIIWDSRKGFIIS |
| | NATYKEIGLLTCEATVNGHLYKTNYLTHRQTNTIIDVVLSPSHGIELSVGEK |
| | LVLNCTARTELNVGIDFNWEYPSSKHQHKKLVNRDLKTQSGSEMKKFLST |
| | LTIDGVTRSDQGLYTCAASSGLMTKKNSTFVRVHEK |
| SEQ ID NO: 529 | KESCDVQLYIKRQSEHSILAGDPFELECPVKYCANRPHVTWCKLNGTTCVK |
| BTLAecd-Fc- | LEDRQTSWKEEKNISFFILHFEPVLPNDNGSYRCSANFQSNLIESHSTTLYVT |
| PD1ecd | DVKSASERPSKDEMASASTKGPSVFPLAPSSKSTSGGTAALGCLVKDYFPEP |
| | VTVSWNSGALTSGVHTFPAVLQSSGLYSLSSVVTVPSSSLGTQTYICNVNH |
| | KPSNTKVDKKVEPKSCDKTHTCPPCPAPELLGGPSVFLFPPKPKDTLMISRT |
| | PEVTCVVVDVSHEDPEVKFNWYVDGVEVHNAKTKPREEQYNSTYRVVSV |
| | LTVLHQDWLNGKEYKCKVSNKALPAPIEKTISKAKGQPREPQVYTLPPSRE |
| | EMTKNQVSLTCLVKGFYPSDIAVEWESNGQPENNYKTTPPVLDSDGSFFLY |
| | SKLTVDKSRWQQGNVFSCSVMHEALHNHYTQKSLSLSPGKGGGGSGGGG |
| | SGGGGSPGWFLDSPDRPWNPPTFSPALLVVTEGDNATFTCSFSNTSESFVLN |
| | WYRMSPSNQTDKLAAFPEDRSQPGQDCRFRVTQLPNGRDFHMSVVRARR |
| | NDSGTYLCGAISLAPKAQIKESLRAELRVTERRAEVPTAHPSPSPRPAGQFQ |
| | TLV |
| SEQ ID NO: 530 | KESCDVQLYIKRQSEHSILAGDPFELECPVKYCANRPHVTWCKLNGTTCVK |
| BTLAecd-Fc- | LEDRQTSWKEEKNISFFILHFEPVLPNDNGSYRCSANFQSNLIESHSTTLYVT |
| SIGLEC10ecd | DVKSASERPSKDEMASASTKGPSVFPLAPSSKSTSGGTAALGCLVKDYFPEP |
| | VTVSWNSGALTSGVHTFPAVLQSSGLYSLSSVVTVPSSSLGTQTYICNVNH |
| | KPSNTKVDKKVEPKSCDKTHTCPPCPAPELLGGPSVFLFPPKPKDTLMISRT |
| | PEVTCVVVDVSHEDPEVKFNWYVDGVEVHNAKTKPREEQYNSTYRVVSV |
| | LTVLHQDWLNGKEYKCKVSNKALPAPIEKTISKAKGQPREPQVYTLPPSRE |
| | EMTKNQVSLTCLVKGFYPSDIAVEWESNGQPENNYKTTPPVLDSDGSFFLY |
| | SKLTVDKSRWQQGNVFSCSVMHEALHNHYTQKSLSLSPGKGGGGSGGGG |
| | SGGGGSMDGRFWIRVQESVMVPEGLCISVPCSFSYPRQDWTGSTPAYGYW |
| | FKAVTETTKGAPVATNHQSREVEMSTRGRFQLTGDPAKGNCSLVIRDAQM |
| | QDESQYFFRVERGSYVRYNFMNDGFFLKVTALTQKPDVYIPETLEPGQPVT |
| | VICVFNWAFEECPPPSFSWTGAALSSQGTKPTTSHFSVLSFTPRPQDHNTDL |
| | TCHVDFSRKGVSAQRTVRLRVAYAPRDLVISISRDNTPALEPQPQGNVPYL |
| | EAQKGQFLRLLCAADSQPPATLSWVLQNRVLSSSHPWGPRPLGLELPGVK |
| | AGDSGRYTCRAENRLGSQQRALDLSVQYPPENLRVMVSQANRTVLENLG |
| | NGTSLPVLEGQSLCLVCVTHSSPPARLSWTQRGQVLSPSQPSDPGVLELPRV |
| | QVEHEGEFTCHARHPLGSQHVSLSLSVHYSPKLLGPSCSWEAEGLHCSCSS |
| | QASPAPSLRWWLGEELLEGNSSQDSFEVTPSSAGPWANSSLSLHGGLSSGL |
| | RLRCEAWNVHGAQSGSILQLPDKKGLIST |
| SEQ ID NO: 531 | KESCDVQLYIKRQSEHSILAGDPFELECPVKYCANRPHVTWCKLNGTTCVK |
| BTLAecd-Fc- | LEDRQTSWKEEKNISFFILHFEPVLPNDNGSYRCSANFQSNLIESHSTTLYVT |
| SIRPaecd | DVKSASERPSKDEMASASTKGPSVFPLAPSSKSTSGGTAALGCLVKDYFPEP |
| | VTVSWNSGALTSGVHTFPAVLQSSGLYSLSSVVTVPSSSLGTQTYICNVNH |
| | KPSNTKVDKKVEPKSCDKTHTCPPCPAPELLGGPSVFLFPPKPKDTLMISRT |
| | PEVTCVVVDVSHEDPEVKFNWYVDGVEVHNAKTKPREEQYNSTYRVVSV |
| | LTVLHQDWLNGKEYKCKVSNKALPAPIEKTISKAKGQPREPQVYTLPPSRE |
| | EMTKNQVSLTCLVKGFYPSDIAVEWESNGQPENNYKTTPPVLDSDGSFFLY |
| | SKLTVDKSRWQQGNVFSCSVMHEALHNHYTQKSLSLSPGKGGGGSGGGG |
| | SGGGGSEEELQVIQPDKSVLVAAGETATLRCTATSLIPVGPIQWFRGAGPGR |
| | ELIYNQKEGHFPRVTTVSDLTKRNNMDFSIRIGNITPADAGTYYCVKFRKGS |
| | PDDVEFKSGAGTELSVRAKPS |
| SEQ ID NO: 532 | KESCDVQLYIKRQSEHSILAGDPFELECPVKYCANRPHVTWCKLNGTTCVK |
| BTLAecd-Fc- | LEDRQTSWKEEKNISFFILHFEPVLPNDNGSYRCSANFQSNLIESHSTTLYVT |
| TGFbRecd | DVKSASERPSKDEMASASTKGPSVFPLAPSSKSTSGGTAALGCLVKDYFPEP |
| | VTVSWNSGALTSGVHTFPAVLQSSGLYSLSSVVTVPSSSLGTQTYICNVNH |
| | KPSNTKVDKKVEPKSCDKTHTCPPCPAPELLGGPSVFLFPPKPKDTLMISRT |
| | PEVTCVVVDVSHEDPEVKFNWYVDGVEVHNAKTKPREEQYNSTYRVVSV |
| | LTVLHQDWLNGKEYKCKVSNKALPAPIEKTISKAKGQPREPQVYTLPPSRE |
| | EMTKNQVSLTCLVKGFYPSDIAVEWESNGQPENNYKTTPPVLDSDGSFFLY |
| | SKLTVDKSRWQQGNVFSCSVMHEALHNHYTQKSLSLSPGKGGGGSGGGG |
| | SGGGGSTIPPHVQKSVNNDMIVTDNNGAVKFPQLCKFCDVRFSTCDNQKS |
| | CMSNCSITSICEKPQEVCVAVWRKNDENITLETVCHDPKLPYHDFILEDAAS |
| | PKCIMKEKKKPGETFFMCSCSSDECNDNIIFSEEYNTSNPD |
| SEQ ID NO: 533 | KESCDVQLYIKRQSEHSILAGDPFELECPVKYCANRPHVTWCKLNGTTCVK |
| BTLAecd-Fc- | LEDRQTSWKEEKNISFFILHFEPVLPNDNGSYRCSANFQSNLIESHSTTLYVT |
| TIM3ecd | DVKSASERPSKDEMASASTKGPSVFPLAPSSKSTSGGTAALGCLVKDYFPEP |
| | VTVSWNSGALTSGVHTFPAVLQSSGLYSLSSVVTVPSSSLGTQTYICNVNH |
| | KPSNTKVDKKVEPKSCDKTHTCPPCPAPELLGGPSVFLFPPKPKDTLMISRT |
| | PEVTCVVVDVSHEDPEVKFNWYVDGVEVHNAKTKPREEQYNSTYRVVSV |
| | LTVLHQDWLNGKEYKCKVSNKALPAPIEKTISKAKGQPREPQVYTLPPSRE |
| | EMTKNQVSLTCLVKGFYPSDIAVEWESNGQPENNYKTTPPVLDSDGSFFLY |
| | SKLTVDKSRWQQGNVFSCSVMHEALHNHYTQKSLSLSPGKGGGGSGGGG |
| | SGGGGSSEVEYRAEVGQNAYLPCFYTPAAPGNLVPVCWGKGACPVFECGN |
| | VVLRTDERDVNYWTSRYWLNGDFRKGDVSLTIENVTLADSGIYCCRIQIPG |
| | IMNDEKFNLKLVIKPAKVTPAPTRQRDFTAAFPRMLTTRGHGPAETQTLGS |
| | LPDINLTQISTLANELRDSRLANDLRDSGATIRIG |
| SEQ ID NO: 534 | KESCDVQLYIKRQSEHSILAGDPFELECPVKYCANRPHVTWCKLNGTTCVK |
| BTLAecd-Fc- | LEDRQTSWKEEKNISFFILHFEPVLPNDNGSYRCSANFQSNLIESHSTTLYVT |
| VEGFRecd | DVKSASERPSKDEMASASTKGPSVFPLAPSSKSTSGGTAALGCLVKDYFPEP |
| | VTVSWNSGALTSGVHTFPAVLQSSGLYSLSSVVTVPSSSLGTQTYICNVNH |
| | KPSNTKVDKKVEPKSCDKTHTCPPCPAPELLGGPSVFLFPPKPKDTLMISRT |
| | PEVTCVVVDVSHEDPEVKFNWYVDGVEVHNAKTKPREEQYNSTYRVVSV |
| | LTVLHQDWLNGKEYKCKVSNKALPAPIEKTISKAKGQPREPQVYTLPPSRE |
| | EMTKNQVSLTCLVKGFYPSDIAVEWESNGQPENNYKTTPPVLDSDGSFFLY |
| | SKLTVDKSRWQQGNVFSCSVMHEALHNHYTQKSLSLSPGKGGGGSGGGG |
| | SGGGGSSDTGRPFVEMYSEIPEIIHMTEGRELVIPCRVTSPNITVTLKKFPLDT |
| | LIPDGKRIIWDSRKGFIISNATYKEIGLLTCEATVNGHLYKTNYLTHRQTNTI |
| | IDVVLSPSHGIELSVGEKLVLNCTARTELNVGIDFNWEYPSSKHQHKKLVN |
| | RDLKTQSGSEMKKFLSTLTIDGVTRSDQGLYTCAASSGLMTKKNSTFVRVH |
| | EK |
| SEQ ID NO: 535 | PGWFLDSPDRPWNPPTFSPALLVVTEGDNATFTCSFSNTSESFVLNWYRMS |
| PD1ecd-Fc- | PSNQTDKLAAFPEDRSQPGQDCRFRVTQLPNGRDFHMSVVRARRNDSGTY |
| BTLAecd | LCGAISLAPKAQIKESLRAELRVTERRAEVPTAHPSPSPRPAGQFQTLVAST |
| | KGPSVFPLAPSSKSTSGGTAALGCLVKDYFPEPVTVSWNSGALTSGVHTFP |
| | AVLQSSGLYSLSSVVTVPSSSLGTQTYICNVNHKPSNTKVDKKVEPKSCDK |
| | THTCPPCPAPELLGGPSVFLFPPKPKDTLMISRTPEVTCVVVDVSHEDPEVK |
| | FNWYVDGVEVHNAKTKPREEQYNSTYRVVSVLTVLHQDWLNGKEYKCK |
| | VSNKALPAPIEKTISKAKGQPREPQVYTLPPSREEMTKNQVSLTCLVKGFYP |
| | SDIAVEWESNGQPENNYKTTPPVLDSDGSFFLYSKLTVDKSRWQQGNVFSC |
| | SVMHEALHNHYTQKSLSLSPGKGGGGSGGGGSGGGGSKESCDVQLYIKRQ |
| | SEHSILAGDPFELECPVKYCANRPHVTWCKLNGTTCVKLEDRQTSWKEEK |
| | NISFFILHFEPVLPNDNGSYRCSANFQSNLIESHSTTLYVTDVKSASERPSKD |
| | EMAS |
| SEQ ID NO: 536 | PGWFLDSPDRPWNPPTFSPALLVVTEGDNATFTCSFSNTSESFVLNWYRMS |
| PD1ecd-Fc- | PSNQTDKLAAFPEDRSQPGQDCRFRVTQLPNGRDFHMSVVRARRNDSGTY |
| SIGLEC10ecd | LCGAISLAPKAQIKESLRAELRVTERRAEVPTAHPSPSPRPAGQFQTLVAST |
| | KGPSVFPLAPSSKSTSGGTAALGCLVKDYFPEPVTVSWNSGALTSGVHTFP |
| | AVLQSSGLYSLSSVVTVPSSSLGTQTYICNVNHKPSNTKVDKKVEPKSCDK |
| | THTCPPCPAPELLGGPSVFLFPPKPKDTLMISRTPEVTCVVVDVSHEDPEVK |
| | FNWYVDGVEVHNAKTKPREEQYNSTYRVVSVLTVLHQDWLNGKEYKCK |
| | VSNKALPAPIEKTISKAKGQPREPQVYTLPPSREEMTKNQVSLTCLVKGFYP |
| | SDIAVEWESNGQPENNYKTTPPVLDSDGSFFLYSKLTVDKSRWQQGNVFSC |
| | SVMHEALHNHYTQKSLSLSPGKGGGGSGGGGSGGGGSMDGRFWIRVQES |
| | VMVPEGLCISVPCSFSYPRQDWTGSTPAYGYWFKAVTETTKGAPVATNHQ |
| | SREVEMSTRGRFQLTGDPAKGNCSLVIRDAQMQDESQYFFRVERGSYVRY |
| | NFMNDGFFLKVTALTQKPDVYIPETLEPGQPVTVICVFNWAFEECPPPSFSW |
| | TGAALSSQGTKPTTSHFSVLSFTPRPQDHNTDLTCHVDFSRKGVSAQRTVR |
| | LRVAYAPRDLVISISRDNTPALEPQPQGNVPYLEAQKGQFLRLLCAADSQPP |
| | ATLSWVLQNRVLSSSHPWGPRPLGLELPGVKAGDSGRYTCRAENRLGSQQ |
| | RALDLSVQYPPENLRVMVSQANRTVLENLGNGTSLPVLEGQSLCLVCVTH |
| | SSPPARLSWTQRGQVLSPSQPSDPGVLELPRVQVEHEGEFTCHARHPLGSQ |
| | HVSLSLSVHYSPKLLGPSCSWEAEGLHCSCSSQASPAPSLRWWLGEELLEG |
| | NSSQDSFEVTPSSAGPWANSSLSLHGGLSSGLRLRCEAWNVHGAQSGSILQ |
| | LPDKKGLIST |
| SEQ ID NO: 537 | PGWFLDSPDRPWNPPTFSPALLVVTEGDNATFTCSFSNTSESFVLNWYRMS |
| PD1ecd-Fc- | PSNQTDKLAAFPEDRSQPGQDCRFRVTQLPNGRDFHMSVVRARRNDSGTY |
| SIRPaecd | LCGAISLAPKAQIKESLRAELRVTERRAEVPTAHPSPSPRPAGQFQTLVAST |
| | KGPSVFPLAPSSKSTSGGTAALGCLVKDYFPEPVTVSWNSGALTSGVHTFP |
| | AVLQSSGLYSLSSVVTVPSSSLGTQTYICNVNHKPSNTKVDKKVEPKSCDK |
| | THTCPPCPAPELLGGPSVFLFPPKPKDTLMISRTPEVTCVVVDVSHEDPEVK |
| | FNWYVDGVEVHNAKTKPREEQYNSTYRVVSVLTVLHQDWLNGKEYKCK |
| | VSNKALPAPIEKTISKAKGQPREPQVYTLPPSREEMTKNQVSLTCLVKGFYP |
| | SDIAVEWESNGQPENNYKTTPPVLDSDGSFFLYSKLTVDKSRWQQGNVFSC |
| | SVMHEALHNHYTQKSLSLSPGKGGGGSGGGGSGGGGSEEELQVIQPDKSV |
| | LVAAGETATLRCTATSLIPVGPIQWFRGAGPGRELIYNQKEGHFPRVTTVSD |
| | LTKRNNMDFSIRIGNITPADAGTYYCVKFRKGSPDDVEFKSGAGTELSVRA |
| | KPS |
| SEQ ID NO: 538 | PGWFLDSPDRPWNPPTFSPALLVVTEGDNATFTCSFSNTSESFVLNWYRMS |
| PD1ecd-Fc- | PSNQTDKLAAFPEDRSQPGQDCRFRVTQLPNGRDFHMSVVRARRNDSGTY |
| TGFbRecd | LCGAISLAPKAQIKESLRAELRVTERRAEVPTAHPSPSPRPAGQFQTLVAST |
| | KGPSVFPLAPSSKSTSGGTAALGCLVKDYFPEPVTVSWNSGALTSGVHTFP |
| | AVLQSSGLYSLSSVVTVPSSSLGTQTYICNVNHKPSNTKVDKKVEPKSCDK |
| | THTCPPCPAPELLGGPSVFLFPPKPKDTLMISRTPEVTCVVVDVSHEDPEVK |
| | FNWYVDGVEVHNAKTKPREEQYNSTYRVVSVLTVLHQDWLNGKEYKCK |
| | VSNKALPAPIEKTISKAKGQPREPQVYTLPPSREEMTKNQVSLTCLVKGFYP |
| | SDIAVEWESNGQPENNYKTTPPVLDSDGSFFLYSKLTVDKSRWQQGNVFSC |
| | SVMHEALHNHYTQKSLSLSPGKGGGGSGGGGSGGGGSTIPPHVQKSVNND |
| | MIVTDNNGAVKFPQLCKFCDVRFSTCDNQKSCMSNCSITSICEKPQEVCVA |
| | VWRKNDENITLETVCHDPKLPYHDFILEDAASPKCIMKEKKKPGETFFMCS |
| | CSSDECNDNIIFSEEYNTSNPD |
| SEQ ID NO: 539 | PGWFLDSPDRPWNPPTFSPALLVVTEGDNATFTCSFSNTSESFVLNWYRMS |
| PD1ecd-Fc- | PSNQTDKLAAFPEDRSQPGQDCRFRVTQLPNGRDFHMSVVRARRNDSGTY |
| TIM3ecd | LCGAISLAPKAQIKESLRAELRVTERRAEVPTAHPSPSPRPAGQFQTLVAST |
| | KGPSVFPLAPSSKSTSGGTAALGCLVKDYFPEPVTVSWNSGALTSGVHTFP |
| | AVLQSSGLYSLSSVVTVPSSSLGTQTYICNVNHKPSNTKVDKKVEPKSCDK |
| | THTCPPCPAPELLGGPSVFLFPPKPKDTLMISRTPEVTCVVVDVSHEDPEVK |
| | FNWYVDGVEVHNAKTKPREEQYNSTYRVVSVLTVLHQDWLNGKEYKCK |
| | VSNKALPAPIEKTISKAKGQPREPQVYTLPPSREEMTKNQVSLTCLVKGFYP |
| | SDIAVEWESNGQPENNYKTTPPVLDSDGSFFLYSKLTVDKSRWQQGNVFSC |
| | SVMHEALHNHYTQKSLSLSPGKGGGGSGGGGSGGGGSSEVEYRAEVGQN |
| | AYLPCFYTPAAPGNLVPVCWGKGACPVFECGNVVLRTDERDVNYWTSRY |
| | WLNGDFRKGDVSLTIENVTLADSGIYCCRIQIPGIMNDEKFNLKLVIKPAKV |
| | TPAPTRQRDFTAAFPRMLTTRGHGPAETQTLGSLPDINLTQISTLANELRDS |
| | RLANDLRDSGATIRIG |
| SEQ ID NO: 540 | PGWFLDSPDRPWNPPTFSPALLVVTEGDNATFTCSFSNTSESFVLNWYRMS |
| PD1ecd-Fc- | PSNQTDKLAAFPEDRSQPGQDCRFRVTQLPNGRDFHMSVVRARRNDSGTY |
| VEGFRecd | LCGAISLAPKAQIKESLRAELRVTERRAEVPTAHPSPSPRPAGQFQTLVAST |
| | KGPSVFPLAPSSKSTSGGTAALGCLVKDYFPEPVTVSWNSGALTSGVHTFP |
| | AVLQSSGLYSLSSVVTVPSSSLGTQTYICNVNHKPSNTKVDKKVEPKSCDK |
| | THTCPPCPAPELLGGPSVFLFPPKPKDTLMISRTPEVTCVVVDVSHEDPEVK |
| | FNWYVDGVEVHNAKTKPREEQYNSTYRVVSVLTVLHQDWLNGKEYKCK |
| | VSNKALPAPIEKTISKAKGQPREPQVYTLPPSREEMTKNQVSLTCLVKGFYP |
| | SDIAVEWESNGQPENNYKTTPPVLDSDGSFFLYSKLTVDKSRWQQGNVFSC |
| | SVMHEALHNHYTQKSLSLSPGKGGGGSGGGGSGGGGSSDTGRPFVEMYSE |
| | IPEIIHMTEGRELVIPCRVTSPNITVTLKKFPLDTLIPDGKRIIWDSRKGFIISN |
| | ATYKEIGLLTCEATVNGHLYKTNYLTHRQTNTIIDVVLSPSHGIELSVGEKL |
| | VLNCTARTELNVGIDFNWEYPSSKHQHKKLVNRDLKTQSGSEMKKFLSTL |
| | TIDGVTRSDQGLYTCAASSGLMTKKNSTFVRVHEK |
| SEQ ID NO: 541 | MDGRFWIRVQESVMVPEGLCISVPCSFSYPRQDWTGSTPAYGYWFKAVTE |
| SIGLEC10ecd- | TTKGAPVATNHQSREVEMSTRGRFQLTGDPAKGNCSLVIRDAQMQDESQY |
| Fc-BTLAecd | FFRVERGSYVRYNFMNDGFFLKVTALTQKPDVYIPETLEPGQPVTVICVFN |
| | WAFEECPPPSFSWTGAALSSQGTKPTTSHFSVLSFTPRPQDHNTDLTCHVDF |
| | SRKGVSAQRTVRLRVAYAPRDLVISISRDNTPALEPQPQGNVPYLEAQKGQ |
| | FLRLLCAADSQPPATLSWVLQNRVLSSSHPWGPRPLGLELPGVKAGDSGRY |
| | TCRAENRLGSQQRALDLSVQYPPENLRVMVSQANRTVLENLGNGTSLPVL |
| | EGQSLCLVCVTHSSPPARLSWTQRGQVLSPSQPSDPGVLELPRVQVEHEGE |
| | FTCHARHPLGSQHVSLSLSVHYSPKLLGPSCSWEAEGLHCSCSSQASPAPSL |
| | RWWLGEELLEGNSSQDSFEVTPSSAGPWANSSLSLHGGLSSGLRLRCEAW |
| | NVHGAQSGSILQLPDKKGLISTASTKGPSVFPLAPSSKSTSGGTAALGCLVK |
| | DYFPEPVTVSWNSGALTSGVHTFPAVLQSSGLYSLSSVVTVPSSSLGTQTYI |
| | CNVNHKPSNTKVDKKVEPKSCDKTHTCPPCPAPELLGGPSVFLFPPKPKDT |
| | LMISRTPEVTCVVVDVSHEDPEVKFNWYVDGVEVHNAKTKPREEQYNSTY |
| | RVVSVLTVLHQDWLNGKEYKCKVSNKALPAPIEKTISKAKGQPREPQVYT |
| | LPPSREEMTKNQVSLTCLVKGFYPSDIAVEWESNGQPENNYKTTPPVLDSD |
| | GSFFLYSKLTVDKSRWQQGNVFSCSVMHEALHNHYTQKSLSLSPGKGGGG |
| | SGGGGSGGGGSKESCDVQLYIKRQSEHSILAGDPFELECPVKYCANRPHVT |
| | WCKLNGTTCVKLEDRQTSWKEEKNISFFILHFEPVLPNDNGSYRCSANFQS |
| | NLIESHSTTLYVTDVKSASERPSKDEMAS |
| SEQ ID NO: 542 | MDGRFWIRVQESVMVPEGLCISVPCSFSYPRQDWTGSTPAYGYWFKAVTE |
| SIGLEC10ecd- | TTKGAPVATNHQSREVEMSTRGRFQLTGDPAKGNCSLVIRDAQMQDESQY |
| Fc-PD1ecd | FFRVERGSYVRYNFMNDGFFLKVTALTQKPDVYIPETLEPGQPVTVICVFN |
| | WAFEECPPPSFSWTGAALSSQGTKPTTSHFSVLSFTPRPQDHNTDLTCHVDF |
| | SRKGVSAQRTVRLRVAYAPRDLVISISRDNTPALEPQPQGNVPYLEAQKGQ |
| | FLRLLCAADSQPPATLSWVLQNRVLSSSHPWGPRPLGLELPGVKAGDSGRY |
| | TCRAENRLGSQQRALDLSVQYPPENLRVMVSQANRTVLENLGNGTSLPVL |
| | EGQSLCLVCVTHSSPPARLSWTQRGQVLSPSQPSDPGVLELPRVQVEHEGE |
| | FTCHARHPLGSQHVSLSLSVHYSPKLLGPSCSWEAEGLHCSCSSQASPAPSL |
| | RWWLGEELLEGNSSQDSFEVTPSSAGPWANSSLSLHGGLSSGLRLRCEAW |
| | NVHGAQSGSILQLPDKKGLISTASTKGPSVFPLAPSSKSTSGGTAALGCLVK |
| | DYFPEPVTVSWNSGALTSGVHTFPAVLQSSGLYSLSSVVTVPSSSLGTQTYI |
| | CNVNHKPSNTKVDKKVEPKSCDKTHTCPPCPAPELLGGPSVFLFPPKPKDT |
| | LMISRTPEVTCVVVDVSHEDPEVKFNWYVDGVEVHNAKTKPREEQYNSTY |
| | RVVSVLTVLHQDWLNGKEYKCKVSNKALPAPIEKTISKAKGQPREPQVYT |
| | LPPSREEMTKNQVSLTCLVKGFYPSDIAVEWESNGQPENNYKTTPPVLDSD |
| | GSFFLYSKLTVDKSRWQQGNVFSCSVMHEALHNHYTQKSLSLSPGKGGGG |
| | SGGGGSGGGGSPGWFLDSPDRPWNPPTFSPALLVVTEGDNATFTCSFSNTS |
| | ESFVLNWYRMSPSNQTDKLAAFPEDRSQPGQDCRFRVTQLPNGRDFHMSV |
| | VRARRNDSGTYLCGAISLAPKAQIKESLRAELRVTERRAEVPTAHPSPSPRP |
| | AGQFQTLV |
| SEQ ID NO: 543 | MDGRFWIRVQESVMVPEGLCISVPCSFSYPRQDWTGSTPAYGYWFKAVTE |
| SIGLEC10ecd- | TTKGAPVATNHQSREVEMSTRGRFQLTGDPAKGNCSLVIRDAQMQDESQY |
| Fc-SIRPaecd | FFRVERGSYVRYNFMNDGFFLKVTALTQKPDVYIPETLEPGQPVTVICVFN |
| | WAFEECPPPSFSWTGAALSSQGTKPTTSHFSVLSFTPRPQDHNTDLTCHVDF |
| | SRKGVSAQRTVRLRVAYAPRDLVISISRDNTPALEPQPQGNVPYLEAQKGQ |
| | FLRLLCAADSQPPATLSWVLQNRVLSSSHPWGPRPLGLELPGVKAGDSGRY |
| | TCRAENRLGSQQRALDLSVQYPPENLRVMVSQANRTVLENLGNGTSLPVL |
| | EGQSLCLVCVTHSSPPARLSWTQRGQVLSPSQPSDPGVLELPRVQVEHEGE |
| | FTCHARHPLGSQHVSLSLSVHYSPKLLGPSCSWEAEGLHCSCSSQASPAPSL |
| | RWWLGEELLEGNSSQDSFEVTPSSAGPWANSSLSLHGGLSSGLRLRCEAW |
| | NVHGAQSGSILQLPDKKGLISTASTKGPSVFPLAPSSKSTSGGTAALGCLVK |
| | DYFPEPVTVSWNSGALTSGVHTFPAVLQSSGLYSLSSVVTVPSSSLGTQTYI |
| | CNVNHKPSNTKVDKKVEPKSCDKTHTCPPCPAPELLGGPSVFLFPPKPKDT |
| | LMISRTPEVTCVVVDVSHEDPEVKFNWYVDGVEVHNAKTKPREEQYNSTY |
| | RVVSVLTVLHQDWLNGKEYKCKVSNKALPAPIEKTISKAKGQPREPQVYT |
| | LPPSREEMTKNQVSLTCLVKGFYPSDIAVEWESNGQPENNYKTTPPVLDSD |
| | GSFFLYSKLTVDKSRWQQGNVFSCSVMHEALHNHYTQKSLSLSPGKGGGG |
| | SGGGGSGGGGSEEELQVIQPDKSVLVAAGETATLRCTATSLIPVGPIQWFRG |
| | AGPGRELIYNQKEGHFPRVTTVSDLTKRNNMDFSIRIGNITPADAGTYYCV |
| | KFRKGSPDDVEFKSGAGTELSVRAKPS |
| SEQ ID NO: 544 | MDGRFWIRVQESVMVPEGLCISVPCSFSYPRQDWTGSTPAYGYWFKAVTE |
| SIGLEC10ecd- | TTKGAPVATNHQSREVEMSTRGRFQLTGDPAKGNCSLVIRDAQMQDESQY |
| Fc-TGFbRecd | FFRVERGSYVRYNFMNDGFFLKVTALTQKPDVYIPETLEPGQPVTVICVFN |
| | WAFEECPPPSFSWTGAALSSQGTKPTTSHFSVLSFTPRPQDHNTDLTCHVDF |
| | SRKGVSAQRTVRLRVAYAPRDLVISISRDNTPALEPQPQGNVPYLEAQKGQ |
| | FLRLLCAADSQPPATLSWVLQNRVLSSSHPWGPRPLGLELPGVKAGDSGRY |
| | TCRAENRLGSQQRALDLSVQYPPENLRVMVSQANRTVLENLGNGTSLPVL |
| | EGQSLCLVCVTHSSPPARLSWTQRGQVLSPSQPSDPGVLELPRVQVEHEGE |
| | FTCHARHPLGSQHVSLSLSVHYSPKLLGPSCSWEAEGLHCSCSSQASPAPSL |
| | RWWLGEELLEGNSSQDSFEVTPSSAGPWANSSLSLHGGLSSGLRLRCEAW |
| | NVHGAQSGSILQLPDKKGLISTASTKGPSVFPLAPSSKSTSGGTAALGCLVK |
| | DYFPEPVTVSWNSGALTSGVHTFPAVLQSSGLYSLSSVVTVPSSSLGTQTYI |
| | CNVNHKPSNTKVDKKVEPKSCDKTHTCPPCPAPELLGGPSVFLFPPKPKDT |
| | LMISRTPEVTCVVVDVSHEDPEVKFNWYVDGVEVHNAKTKPREEQYNSTY |
| | RVVSVLTVLHQDWLNGKEYKCKVSNKALPAPIEKTISKAKGQPREPQVYT |
| | LPPSREEMTKNQVSLTCLVKGFYPSDIAVEWESNGQPENNYKTTPPVLDSD |
| | GSFFLYSKLTVDKSRWQQGNVFSCSVMHEALHNHYTQKSLSLSPGKGGGG |
| | SGGGGSGGGGSTIPPHVQKSVNNDMIVTDNNGAVKFPQLCKFCDVRFSTC |
| | DNQKSCMSNCSITSICEKPQEVCVAVWRKNDENITLETVCHDPKLPYHDFIL |
| | EDAASPKCIMKEKKKPGETFFMCSCSSDECNDNIIFSEEYNTSNPD |
| SEQ ID NO: 545 | MDGRFWIRVQESVMVPEGLCISVPCSFSYPRQDWTGSTPAYGYWFKAVTE |
| SIGLEC10ecd- | TTKGAPVATNHQSREVEMSTRGRFQLTGDPAKGNCSLVIRDAQMQDESQY |
| Fc-TIM3ecd | FFRVERGSYVRYNFMNDGFFLKVTALTQKPDVYIPETLEPGQPVTVICVFN |
| | WAFEECPPPSFSWTGAALSSQGTKPTTSHFSVLSFTPRPQDHNTDLTCHVDF |
| | SRKGVSAQRTVRLRVAYAPRDLVISISRDNTPALEPQPQGNVPYLEAQKGQ |
| | FLRLLCAADSQPPATLSWVLQNRVLSSSHPWGPRPLGLELPGVKAGDSGRY |
| | TCRAENRLGSQQRALDLSVQYPPENLRVMVSQANRTVLENLGNGTSLPVL |
| | EGQSLCLVCVTHSSPPARLSWTQRGQVLSPSQPSDPGVLELPRVQVEHEGE |
| | FTCHARHPLGSQHVSLSLSVHYSPKLLGPSCSWEAEGLHCSCSSQASPAPSL |
| | RWWLGEELLEGNSSQDSFEVTPSSAGPWANSSLSLHGGLSSGLRLRCEAW |
| | NVHGAQSGSILQLPDKKGLISTASTKGPSVFPLAPSSKSTSGGTAALGCLVK |
| | DYFPEPVTVSWNSGALTSGVHTFPAVLQSSGLYSLSSVVTVPSSSLGTQTYI |
| | CNVNHKPSNTKVDKKVEPKSCDKTHTCPPCPAPELLGGPSVFLFPPKPKDT |
| | LMISRTPEVTCVVVDVSHEDPEVKFNWYVDGVEVHNAKTKPREEQYNSTY |
| | RVVSVLTVLHQDWLNGKEYKCKVSNKALPAPIEKTISKAKGQPREPQVYT |
| | LPPSREEMTKNQVSLTCLVKGFYPSDIAVEWESNGQPENNYKTTPPVLDSD |
| | GSFFLYSKLTVDKSRWQQGNVFSCSVMHEALHNHYTQKSLSLSPGKGGGG |
| | SGGGGSGGGGSSEVEYRAEVGQNAYLPCFYTPAAPGNLVPVCWGKGACP |
| | VFECGNVVLRTDERDVNYWTSRYWLNGDFRKGDVSLTIENVTLADSGIYC |
| | CRIQIPGIMNDEKFNLKLVIKPAKVTPAPTRQRDFTAAFPRMLTTRGHGPAE |
| | TQTLGSLPDINLTQISTLANELRDSRLANDLRDSGATIRIG |
| SEQ ID NO: 546 | MDGRFWIRVQESVMVPEGLCISVPCSFSYPRQDWTGSTPAYGYWFKAVTE |
| SIGLEC10ecd- | TTKGAPVATNHQSREVEMSTRGRFQLTGDPAKGNCSLVIRDAQMQDESQY |
| Fc-VEGFRecd | FFRVERGSYVRYNFMNDGFFLKVTALTQKPDVYIPETLEPGQPVTVICVFN |
| | WAFEECPPPSFSWTGAALSSQGTKPTTSHFSVLSFTPRPQDHNTDLTCHVDF |
| | SRKGVSAQRTVRLRVAYAPRDLVISISRDNTPALEPQPQGNVPYLEAQKGQ |
| | FLRLLCAADSQPPATLSWVLQNRVLSSSHPWGPRPLGLELPGVKAGDSGRY |
| | TCRAENRLGSQQRALDLSVQYPPENLRVMVSQANRTVLENLGNGTSLPVL |
| | EGQSLCLVCVTHSSPPARLSWTQRGQVLSPSQPSDPGVLELPRVQVEHEGE |
| | FTCHARHPLGSQHVSLSLSVHYSPKLLGPSCSWEAEGLHCSCSSQASPAPSL |
| | RWWLGEELLEGNSSQDSFEVTPSSAGPWANSSLSLHGGLSSGLRLRCEAW |
| | NVHGAQSGSILQLPDKKGLISTASTKGPSVFPLAPSSKSTSGGTAALGCLVK |
| | DYFPEPVTVSWNSGALTSGVHTFPAVLQSSGLYSLSSVVTVPSSSLGTQTYI |
| | CNVNHKPSNTKVDKKVEPKSCDKTHTCPPCPAPELLGGPSVFLFPPKPKDT |
| | LMISRTPEVTCVVVDVSHEDPEVKFNWYVDGVEVHNAKTKPREEQYNSTY |
| | RVVSVLTVLHQDWLNGKEYKCKVSNKALPAPIEKTISKAKGQPREPQVYT |
| | LPPSREEMTKNQVSLTCLVKGFYPSDIAVEWESNGQPENNYKTTPPVLDSD |
| | GSFFLYSKLTVDKSRWQQGNVFSCSVMHEALHNHYTQKSLSLSPGKGGGG |
| | SGGGGSGGGGSSDTGRPFVEMYSEIPEIIHMTEGRELVIPCRVTSPNITVTLK |
| | KFPLDTLIPDGKRIIWDSRKGFIISNATYKEIGLLTCEATVNGHLYKTNYLTH |
| | RQTNTIIDVVLSPSHGIELSVGEKLVLNCTARTELNVGIDFNWEYPSSKHQH |
| | KKLVNRDLKTQSGSEMKKFLSTLTIDGVTRSDQGLYTCAASSGLMTKKNS |
| | TFVRVHEK |
| SEQ ID NO: 547 | EEELQVIQPDKSVLVAAGETATLRCTATSLIPVGPIQWFRGAGPGRELIYNQ |
| SIRPaecd-Fc- | KEGHFPRVTTVSDLTKRNNMDFSIRIGNITPADAGTYYCVKFRKGSPDDVE |
| BTLAecd | FKSGAGTELSVRAKPSASTKGPSVFPLAPSSKSTSGGTAALGCLVKDYFPEP |
| | VTVSWNSGALTSGVHTFPAVLQSSGLYSLSSVVTVPSSSLGTQTYICNVNH |
| | KPSNTKVDKKVEPKSCDKTHTCPPCPAPELLGGPSVFLFPPKPKDTLMISRT |
| | PEVTCVVVDVSHEDPEVKFNWYVDGVEVHNAKTKPREEQYNSTYRVVSV |
| | LTVLHQDWLNGKEYKCKVSNKALPAPIEKTISKAKGQPREPQVYTLPPSRE |
| | EMTKNQVSLTCLVKGFYPSDIAVEWESNGQPENNYKTTPPVLDSDGSFFLY |
| | SKLTVDKSRWQQGNVFSCSVMHEALHNHYTQKSLSLSPGKGGGGSGGGG |
| | SGGGGSKESCDVQLYIKRQSEHSILAGDPFELECPVKYCANRPHVTWCKLN |
| | GTTCVKLEDRQTSWKEEKNISFFILHFEPVLPNDNGSYRCSANFQSNLIESHS |
| | TTLYVTDVKSASERPSKDEMAS |
| SEQ ID NO: 548 | EEELQVIQPDKSVLVAAGETATLRCTATSLIPVGPIQWFRGAGPGRELIYNQ |
| SIRPaecd-Fc- | KEGHFPRVTTVSDLTKRNNMDFSIRIGNITPADAGTYYCVKFRKGSPDDVE |
| PD1ecd | FKSGAGTELSVRAKPSASTKGPSVFPLAPSSKSTSGGTAALGCLVKDYFPEP |
| | VTVSWNSGALTSGVHTFPAVLQSSGLYSLSSVVTVPSSSLGTQTYICNVNH |
| | KPSNTKVDKKVEPKSCDKTHTCPPCPAPELLGGPSVFLFPPKPKDTLMISRT |
| | PEVTCVVVDVSHEDPEVKFNWYVDGVEVHNAKTKPREEQYNSTYRVVSV |
| | LTVLHQDWLNGKEYKCKVSNKALPAPIEKTISKAKGQPREPQVYTLPPSRE |
| | EMTKNQVSLTCLVKGFYPSDIAVEWESNGQPENNYKTTPPVLDSDGSFFLY |
| | SKLTVDKSRWQQGNVFSCSVMHEALHNHYTQKSLSLSPGKGGGGSGGGG |
| | SGGGGSPGWFLDSPDRPWNPPTFSPALLVVTEGDNATFTCSFSNTSESFVLN |
| | WYRMSPSNQTDKLAAFPEDRSQPGQDCRFRVTQLPNGRDFHMSVVRARR |
| | NDSGTYLCGAISLAPKAQIKESLRAELRVTERRAEVPTAHPSPSPRPAGQFQ |
| | TLV |
| SEQ ID NO: 549 | EEELQVIQPDKSVLVAAGETATLRCTATSLIPVGPIQWFRGAGPGRELIYNQ |
| SIRPaecd-Fc- | KEGHFPRVTTVSDLTKRNNMDFSIRIGNITPADAGTYYCVKFRKGSPDDVE |
| SIGLEC10ecd | FKSGAGTELSVRAKPSASTKGPSVFPLAPSSKSTSGGTAALGCLVKDYFPEP |
| | VTVSWNSGALTSGVHTFPAVLQSSGLYSLSSVVTVPSSSLGTQTYICNVNH |
| | KPSNTKVDKKVEPKSCDKTHTCPPCPAPELLGGPSVFLFPPKPKDTLMISRT |
| | PEVTCVVVDVSHEDPEVKFNWYVDGVEVHNAKTKPREEQYNSTYRVVSV |
| | LTVLHQDWLNGKEYKCKVSNKALPAPIEKTISKAKGQPREPQVYTLPPSRE |
| | EMTKNQVSLTCLVKGFYPSDIAVEWESNGQPENNYKTTPPVLDSDGSFFLY |
| | SKLTVDKSRWQQGNVFSCSVMHEALHNHYTQKSLSLSPGKGGGGSGGGG |
| | SGGGGSMDGRFWIRVQESVMVPEGLCISVPCSFSYPRQDWTGSTPAYGYW |
| | FKAVTETTKGAPVATNHQSREVEMSTRGRFQLTGDPAKGNCSLVIRDAQM |
| | QDESQYFFRVERGSYVRYNFMNDGFFLKVTALTQKPDVYIPETLEPGQPVT |
| | VICVFNWAFEECPPPSFSWTGAALSSQGTKPTTSHFSVLSFTPRPQDHNTDL |
| | TCHVDFSRKGVSAQRTVRLRVAYAPRDLVISISRDNTPALEPQPQGNVPYL |
| | EAQKGQFLRLLCAADSQPPATLSWVLQNRVLSSSHPWGPRPLGLELPGVK |
| | AGDSGRYTCRAENRLGSQQRALDLSVQYPPENLRVMVSQANRTVLENLG |
| | NGTSLPVLEGQSLCLVCVTHSSPPARLSWTQRGQVLSPSQPSDPGVLELPRV |
| | QVEHEGEFTCHARHPLGSQHVSLSLSVHYSPKLLGPSCSWEAEGLHCSCSS |
| | QASPAPSLRWWLGEELLEGNSSQDSFEVTPSSAGPWANSSLSLHGGLSSGL |
| | RLRCEAWNVHGAQSGSILQLPDKKGLIST |
| SEQ ID NO: 550 | EEELQVIQPDKSVLVAAGETATLRCTATSLIPVGPIQWFRGAGPGRELIYNQ |
| SIRPaecd-Fc- | KEGHFPRVTTVSDLTKRNNMDFSIRIGNITPADAGTYYCVKFRKGSPDDVE |
| TGFbRecd | FKSGAGTELSVRAKPSASTKGPSVFPLAPSSKSTSGGTAALGCLVKDYFPEP |
| | VTVSWNSGALTSGVHTFPAVLQSSGLYSLSSVVTVPSSSLGTQTYICNVNH |
| | KPSNTKVDKKVEPKSCDKTHTCPPCPAPELLGGPSVFLFPPKPKDTLMISRT |
| | PEVTCVVVDVSHEDPEVKFNWYVDGVEVHNAKTKPREEQYNSTYRVVSV |
| | LTVLHQDWLNGKEYKCKVSNKALPAPIEKTISKAKGQPREPQVYTLPPSRE |
| | EMTKNQVSLTCLVKGFYPSDIAVEWESNGQPENNYKTTPPVLDSDGSFFLY |
| | SKLTVDKSRWQQGNVFSCSVMHEALHNHYTQKSLSLSPGKGGGGSGGGG |
| | SGGGGSTIPPHVQKSVNNDMIVTDNNGAVKFPQLCKFCDVRFSTCDNQKS |
| | CMSNCSITSICEKPQEVCVAVWRKNDENITLETVCHDPKLPYHDFILEDAAS |
| | PKCIMKEKKKPGETFFMCSCSSDECNDNIIFSEEYNTSNPD |
| SEQ ID NO: 551 | EEELQVIQPDKSVLVAAGETATLRCTATSLIPVGPIQWFRGAGPGRELIYNQ |
| SIRPaecd-Fc- | KEGHFPRVTTVSDLTKRNNMDFSIRIGNITPADAGTYYCVKFRKGSPDDVE |
| TIM3ecd | FKSGAGTELSVRAKPSASTKGPSVFPLAPSSKSTSGGTAALGCLVKDYFPEP |
| | VTVSWNSGALTSGVHTFPAVLQSSGLYSLSSVVTVPSSSLGTQTYICNVNH |
| | KPSNTKVDKKVEPKSCDKTHTCPPCPAPELLGGPSVFLFPPKPKDTLMISRT |
| | PEVTCVVVDVSHEDPEVKFNWYVDGVEVHNAKTKPREEQYNSTYRVVSV |
| | LTVLHQDWLNGKEYKCKVSNKALPAPIEKTISKAKGQPREPQVYTLPPSRE |
| | EMTKNQVSLTCLVKGFYPSDIAVEWESNGQPENNYKTTPPVLDSDGSFFLY |
| | SKLTVDKSRWQQGNVFSCSVMHEALHNHYTQKSLSLSPGKGGGGSGGGG |
| | SGGGGSSEVEYRAEVGQNAYLPCFYTPAAPGNLVPVCWGKGACPVFECGN |
| | VVLRTDERDVNYWTSRYWLNGDFRKGDVSLTIENVTLADSGIYCCRIQIPG |
| | IMNDEKFNLKLVIKPAKVTPAPTRQRDFTAAFPRMLTTRGHGPAETQTLGS |
| | LPDINLTQISTLANELRDSRLANDLRDSGATIRIG |
| SEQ ID NO: 552 | EEELQVIQPDKSVLVAAGETATLRCTATSLIPVGPIQWFRGAGPGRELIYNQ |
| SIRPaecd-Fc- | KEGHFPRVTTVSDLTKRNNMDFSIRIGNITPADAGTYYCVKFRKGSPDDVE |
| VEGFRec | FKSGAGTELSVRAKPSASTKGPSVFPLAPSSKSTSGGTAALGCLVKDYFPEP |
| | VTVSWNSGALTSGVHTFPAVLQSSGLYSLSSVVTVPSSSLGTQTYICNVNH |
| | KPSNTKVDKKVEPKSCDKTHTCPPCPAPELLGGPSVFLFPPKPKDTLMISRT |
| | PEVTCVVVDVSHEDPEVKFNWYVDGVEVHNAKTKPREEQYNSTYRVVSV |
| | LTVLHQDWLNGKEYKCKVSNKALPAPIEKTISKAKGQPREPQVYTLPPSRE |
| | EMTKNQVSLTCLVKGFYPSDIAVEWESNGQPENNYKTTPPVLDSDGSFFLY |
| | SKLTVDKSRWQQGNVFSCSVMHEALHNHYTQKSLSLSPGKGGGGSGGGG |
| | SGGGGSSDTGRPFVEMYSEIPEIIHMTEGRELVIPCRVTSPNITVTLKKFPLDT |
| | LIPDGKRIIWDSRKGFIISNATYKEIGLLTCEATVNGHLYKTNYLTHRQTNTI |
| | IDVVLSPSHGIELSVGEKLVLNCTARTELNVGIDFNWEYPSSKHQHKKLVN |
| | RDLKTQSGSEMKKFLSTLTIDGVTRSDQGLYTCAASSGLMTKKNSTFVRVH |
| | EK |
| SEQ ID NO: 553 | TIPPHVQKSVNNDMIVTDNNGAVKFPQLCKFCDVRFSTCDNQKSCMSNCSI |
| TGFbRecd-Fc- | TSICEKPQEVCVAVWRKNDENITLETVCHDPKLPYHDFILEDAASPKCIMKE |
| BTLAecd | KKKPGETFFMCSCSSDECNDNIIFSEEYNTSNPDASTKGPSVFPLAPSSKSTS |
| | GGTAALGCLVKDYFPEPVTVSWNSGALTSGVHTFPAVLQSSGLYSLSSVVT |
| | VPSSSLGTQTYICNVNHKPSNTKVDKKVEPKSCDKTHTCPPCPAPELLGGPS |
| | VFLFPPKPKDTLMISRTPEVTCVVVDVSHEDPEVKFNWYVDGVEVHNAKT |
| | KPREEQYNSTYRVVSVLTVLHQDWLNGKEYKCKVSNKALPAPIEKTISKA |
| | KGQPREPQVYTLPPSREEMTKNQVSLTCLVKGFYPSDIAVEWESNGQPENN |
| | YKTTPPVLDSDGSFFLYSKLTVDKSRWQQGNVFSCSVMHEALHNHYTQKS |
| | LSLSPGKGGGGSGGGGSGGGGSKESCDVQLYIKRQSEHSILAGDPFELECPV |
| | KYCANRPHVTWCKLNGTTCVKLEDRQTSWKEEKNISFFILHFEPVLPNDNG |
| | SYRCSANFQSNLIESHSTTLYVTDVKSASERPSKDEMAS |
| SEQ ID NO: 554 | TIPPHVQKSVNNDMIVTDNNGAVKFPQLCKFCDVRFSTCDNQKSCMSNCSI |
| TGFbRecd-Fc- | TSICEKPQEVCVAVWRKNDENITLETVCHDPKLPYHDFILEDAASPKCIMKE |
| PD1ecd | KKKPGETFFMCSCSSDECNDNIIFSEEYNTSNPDASTKGPSVFPLAPSSKSTS |
| | GGTAALGCLVKDYFPEPVTVSWNSGALTSGVHTFPAVLQSSGLYSLSSVVT |
| | VPSSSLGTQTYICNVNHKPSNTKVDKKVEPKSCDKTHTCPPCPAPELLGGPS |
| | VFLFPPKPKDTLMISRTPEVTCVVVDVSHEDPEVKFNWYVDGVEVHNAKT |
| | KPREEQYNSTYRVVSVLTVLHQDWLNGKEYKCKVSNKALPAPIEKTISKA |
| | KGQPREPQVYTLPPSREEMTKNQVSLTCLVKGFYPSDIAVEWESNGQPENN |
| | YKTTPPVLDSDGSFFLYSKLTVDKSRWQQGNVFSCSVMHEALHNHYTQKS |
| | LSLSPGKGGGGSGGGGSGGGGSPGWFLDSPDRPWNPPTFSPALLVVTEGD |
| | NATFTCSFSNTSESFVLNWYRMSPSNQTDKLAAFPEDRSQPGQDCRFRVTQ |
| | LPNGRDFHMSVVRARRNDSGTYLCGAISLAPKAQIKESLRAELRVTERRAE |
| | VPTAHPSPSPRPAGQFQTLV |
| SEQ ID NO: 555 | TIPPHVQKSVNNDMIVTDNNGAVKFPQLCKFCDVRFSTCDNQKSCMSNCSI |
| TGFbRecd-Fc- | TSICEKPQEVCVAVWRKNDENITLETVCHDPKLPYHDFILEDAASPKCIMKE |
| SIGLEC10ecd | KKKPGETFFMCSCSSDECNDNIIFSEEYNTSNPDASTKGPSVFPLAPSSKSTS |
| | GGTAALGCLVKDYFPEPVTVSWNSGALTSGVHTFPAVLQSSGLYSLSSVVT |
| | VPSSSLGTQTYICNVNHKPSNTKVDKKVEPKSCDKTHTCPPCPAPELLGGPS |
| | VFLFPPKPKDTLMISRTPEVTCVVVDVSHEDPEVKFNWYVDGVEVHNAKT |
| | KPREEQYNSTYRVVSVLTVLHQDWLNGKEYKCKVSNKALPAPIEKTISKA |
| | KGQPREPQVYTLPPSREEMTKNQVSLTCLVKGFYPSDIAVEWESNGQPENN |
| | YKTTPPVLDSDGSFFLYSKLTVDKSRWQQGNVFSCSVMHEALHNHYTQKS |
| | LSLSPGKGGGGSGGGGSGGGGSMDGRFWIRVQESVMVPEGLCISVPCSFSY |
| | PRQDWTGSTPAYGYWFKAVTETTKGAPVATNHQSREVEMSTRGRFQLTG |
| | DPAKGNCSLVIRDAQMQDESQYFFRVERGSYVRYNFMNDGFFLKVTALTQ |
| | KPDVYIPETLEPGQPVTVICVFNWAFEECPPPSFSWTGAALSSQGTKPTTSH |
| | FSVLSFTPRPQDHNTDLTCHVDFSRKGVSAQRTVRLRVAYAPRDLVISISRD |
| | NTPALEPQPQGNVPYLEAQKGQFLRLLCAADSQPPATLSWVLQNRVLSSSH |
| | PWGPRPLGLELPGVKAGDSGRYTCRAENRLGSQQRALDLSVQYPPENLRV |
| | MVSQANRTVLENLGNGTSLPVLEGQSLCLVCVTHSSPPARLSWTQRGQVL |
| | SPSQPSDPGVLELPRVQVEHEGEFTCHARHPLGSQHVSLSLSVHYSPKLLGP |
| | SCSWEAEGLHCSCSSQASPAPSLRWWLGEELLEGNSSQDSFEVTPSSAGPW |
| | ANSSLSLHGGLSSGLRLRCEAWNVHGAQSGSILQLPDKKGLIST |
| SEQ ID NO: 556 | TIPPHVQKSVNNDMIVTDNNGAVKFPQLCKFCDVRFSTCDNQKSCMSNCSI |
| TGFbRecd-Fc- | TSICEKPQEVCVAVWRKNDENITLETVCHDPKLPYHDFILEDAASPKCIMKE |
| SIRPaecd | KKKPGETFFMCSCSSDECNDNIIFSEEYNTSNPDASTKGPSVFPLAPSSKSTS |
| | GGTAALGCLVKDYFPEPVTVSWNSGALTSGVHTFPAVLQSSGLYSLSSVVT |
| | VPSSSLGTQTYICNVNHKPSNTKVDKKVEPKSCDKTHTCPPCPAPELLGGPS |
| | VFLFPPKPKDTLMISRTPEVTCVVVDVSHEDPEVKFNWYVDGVEVHNAKT |
| | KPREEQYNSTYRVVSVLTVLHQDWLNGKEYKCKVSNKALPAPIEKTISKA |
| | KGQPREPQVYTLPPSREEMTKNQVSLTCLVKGFYPSDIAVEWESNGQPENN |
| | YKTTPPVLDSDGSFFLYSKLTVDKSRWQQGNVFSCSVMHEALHNHYTQKS |
| | LSLSPGKGGGGSGGGGSGGGGSEEELQVIQPDKSVLVAAGETATLRCTATS |
| | LIPVGPIQWFRGAGPGRELIYNQKEGHFPRVTTVSDLTKRNNMDFSIRIGNIT |
| | PADAGTYYCVKFRKGSPDDVEFKSGAGTELSVRAKPS |
| SEQ ID NO: 557 | TIPPHVQKSVNNDMIVTDNNGAVKFPQLCKFCDVRFSTCDNQKSCMSNCSI |
| TGFbRecd-Fc- | TSICEKPQEVCVAVWRKNDENITLETVCHDPKLPYHDFILEDAASPKCIMKE |
| TIM3ecd | KKKPGETFFMCSCSSDECNDNIIFSEEYNTSNPDASTKGPSVFPLAPSSKSTS |
| | GGTAALGCLVKDYFPEPVTVSWNSGALTSGVHTFPAVLQSSGLYSLSSVVT |
| | VPSSSLGTQTYICNVNHKPSNTKVDKKVEPKSCDKTHTCPPCPAPELLGGPS |
| | VFLFPPKPKDTLMISRTPEVTCVVVDVSHEDPEVKFNWYVDGVEVHNAKT |
| | KPREEQYNSTYRVVSVLTVLHQDWLNGKEYKCKVSNKALPAPIEKTISKA |
| | KGQPREPQVYTLPPSREEMTKNQVSLTCLVKGFYPSDIAVEWESNGQPENN |
| | YKTTPPVLDSDGSFFLYSKLTVDKSRWQQGNVFSCSVMHEALHNHYTQKS |
| | LSLSPGKGGGGSGGGGSGGGGSSEVEYRAEVGQNAYLPCFYTPAAPGNLV |
| | PVCWGKGACPVFECGNVVLRTDERDVNYWTSRYWLNGDFRKGDVSLTIE |
| | NVTLADSGIYCCRIQIPGIMNDEKFNLKLVIKPAKVTPAPTRQRDFTAAFPR |
| | MLTTRGHGPAETQTLGSLPDINLTQISTLANELRDSRLANDLRDSGATIRIG |
| SEQ ID NO: 558 | TIPPHVQKSVNNDMIVTDNNGAVKFPQLCKFCDVRFSTCDNQKSCMSNCSI |
| TGFbRecd-Fc- | TSICEKPQEVCVAVWRKNDENITLETVCHDPKLPYHDFILEDAASPKCIMKE |
| VEGFRecd | KKKPGETFFMCSCSSDECNDNIIFSEEYNTSNPDASTKGPSVFPLAPSSKSTS |
| | GGTAALGCLVKDYFPEPVTVSWNSGALTSGVHTFPAVLQSSGLYSLSSVVT |
| | VPSSSLGTQTYICNVNHKPSNTKVDKKVEPKSCDKTHTCPPCPAPELLGGPS |
| | VFLFPPKPKDTLMISRTPEVTCVVVDVSHEDPEVKFNWYVDGVEVHNAKT |
| | KPREEQYNSTYRVVSVLTVLHQDWLNGKEYKCKVSNKALPAPIEKTISKA |
| | KGQPREPQVYTLPPSREEMTKNQVSLTCLVKGFYPSDIAVEWESNGQPENN |
| | YKTTPPVLDSDGSFFLYSKLTVDKSRWQQGNVFSCSVMHEALHNHYTQKS |
| | LSLSPGKGGGGSGGGGSGGGGSSDTGRPFVEMYSEIPEIIHMTEGRELVIPC |
| | RVTSPNITVTLKKFPLDTLIPDGKRIIWDSRKGFIISNATYKEIGLLTCEATVN |
| | GHLYKTNYLTHRQTNTIIDVVLSPSHGIELSVGEKLVLNCTARTELNVGIDF |
| | NWEYPSSKHQHKKLVNRDLKTQSGSEMKKFLSTLTIDGVTRSDQGLYTCA |
| | ASSGLMTKKNSTFVRVHEK |
| SEQ ID NO: 559 | SEVEYRAEVGQNAYLPCFYTPAAPGNLVPVCWGKGACPVFECGNVVLRT |
| TIM3ecd-Fc- | DERDVNYWTSRYWLNGDFRKGDVSLTIENVTLADSGIYCCRIQIPGIMNDE |
| BTLAecd | KFNLKLVIKPAKVTPAPTRQRDFTAAFPRMLTTRGHGPAETQTLGSLPDINL |
| | TQISTLANELRDSRLANDLRDSGATIRIGASTKGPSVFPLAPSSKSTSGGTAA |
| | LGCLVKDYFPEPVTVSWNSGALTSGVHTFPAVLQSSGLYSLSSVVTVPSSSL |
| | GTQTYICNVNHKPSNTKVDKKVEPKSCDKTHTCPPCPAPELLGGPSVFLFPP |
| | KPKDTLMISRTPEVTCVVVDVSHEDPEVKFNWYVDGVEVHNAKTKPREEQ |
| | YNSTYRVVSVLTVLHQDWLNGKEYKCKVSNKALPAPIEKTISKAKGQPRE |
| | PQVYTLPPSREEMTKNQVSLTCLVKGFYPSDIAVEWESNGQPENNYKTTPP |
| | VLDSDGSFFLYSKLTVDKSRWQQGNVFSCSVMHEALHNHYTQKSLSLSPG |
| | KGGGGSGGGGSGGGGSKESCDVQLYIKRQSEHSILAGDPFELECPVKYCAN |
| | RPHVTWCKLNGTTCVKLEDRQTSWKEEKNISFFILHFEPVLPNDNGSYRCS |
| | ANFQSNLIESHSTTLYVTDVKSASERPSKDEMAS |
| SEQ ID NO: 560 | SEVEYRAEVGQNAYLPCFYTPAAPGNLVPVCWGKGACPVFECGNVVLRT |
| TIM3ecd-Fc- | DERDVNYWTSRYWLNGDFRKGDVSLTIENVTLADSGIYCCRIQIPGIMNDE |
| PD1ecd | KFNLKLVIKPAKVTPAPTRQRDFTAAFPRMLTTRGHGPAETQTLGSLPDINL |
| | TQISTLANELRDSRLANDLRDSGATIRIGASTKGPSVFPLAPSSKSTSGGTAA |
| | LGCLVKDYFPEPVTVSWNSGALTSGVHTFPAVLQSSGLYSLSSVVTVPSSSL |
| | GTQTYICNVNHKPSNTKVDKKVEPKSCDKTHTCPPCPAPELLGGPSVFLFPP |
| | KPKDTLMISRTPEVTCVVVDVSHEDPEVKFNWYVDGVEVHNAKTKPREEQ |
| | YNSTYRVVSVLTVLHQDWLNGKEYKCKVSNKALPAPIEKTISKAKGQPRE |
| | PQVYTLPPSREEMTKNQVSLTCLVKGFYPSDIAVEWESNGQPENNYKTTPP |
| | VLDSDGSFFLYSKLTVDKSRWQQGNVFSCSVMHEALHNHYTQKSLSLSPG |
| | KGGGGSGGGGSGGGGSPGWFLDSPDRPWNPPTFSPALLVVTEGDNATFTC |
| | SFSNTSESFVLNWYRMSPSNQTDKLAAFPEDRSQPGQDCRFRVTQLPNGRD |
| | FHMSVVRARRNDSGTYLCGAISLAPKAQIKESLRAELRVTERRAEVPTAHP |
| | SPSPRPAGQFQTLV |
| SEQ ID NO: 561 | SEVEYRAEVGQNAYLPCFYTPAAPGNLVPVCWGKGACPVFECGNVVLRT |
| TIM3ecd-Fc- | DERDVNYWTSRYWLNGDFRKGDVSLTIENVTLADSGIYCCRIQIPGIMNDE |
| SIGLEC10ecd | KFNLKLVIKPAKVTPAPTRQRDFTAAFPRMLTTRGHGPAETQTLGSLPDINL |
| | TQISTLANELRDSRLANDLRDSGATIRIGASTKGPSVFPLAPSSKSTSGGTAA |
| | LGCLVKDYFPEPVTVSWNSGALTSGVHTFPAVLQSSGLYSLSSVVTVPSSSL |
| | GTQTYICNVNHKPSNTKVDKKVEPKSCDKTHTCPPCPAPELLGGPSVFLFPP |
| | KPKDTLMISRTPEVTCVVVDVSHEDPEVKFNWYVDGVEVHNAKTKPREEQ |
| | YNSTYRVVSVLTVLHQDWLNGKEYKCKVSNKALPAPIEKTISKAKGQPRE |
| | PQVYTLPPSREEMTKNQVSLTCLVKGFYPSDIAVEWESNGQPENNYKTTPP |
| | VLDSDGSFFLYSKLTVDKSRWQQGNVFSCSVMHEALHNHYTQKSLSLSPG |
| | KGGGGSGGGGSGGGGSMDGRFW1RVQESVMVPEGLCISVPCSFSYPRQDW |
| | TGSTPAYGYWFKAVTETTKGAPVATNHQSREVEMSTRGRFQLTGDPAKG |
| | NCSLVIRDAQMQDESQYFFRVERGSYVRYNFMNDGFFLKVTALTQKPDVY |
| | IPETLEPGQPVTVICVFNWAFEECPPPSFSWTGAALSSQGTKPTTSHFSVLSF |
| | TPRPQDHNTDLTCHVDFSRKGVSAQRTVRLRVAYAPRDLVISISRDNTPAL |
| | EPQPQGNVPYLEAQKGQFLRLLCAADSQPPATLSWVLQNRVLSSSHPWGP |
| | RPLGLELPGVKAGDSGRYTCRAENRLGSQQRALDLSVQYPPENLRVMVSQ |
| | ANRTVLENLGNGTSLPVLEGQSLCLVCVTHSSPPARLSWTQRGQVLSPSQP |
| | SDPGVLELPRVQVEHEGEFTCHARHPLGSQHVSLSLSVHYSPKLLGPSCSW |
| | EAEGLHCSCSSQASPAPSLRWWLGEELLEGNSSQDSFEVTPSSAGPWANSS |
| | LSLHGGLSSGLRLRCEAWNVHGAQSGSILQLPDKKGLIST |
| SEQ ID NO: 562 | SEVEYRAEVGQNAYLPCFYTPAAPGNLVPVCWGKGACPVFECGNVVLRT |
| TIM3ecd-Fc- | DERDVNYWTSRYWLNGDFRKGDVSLTIENVTLADSGIYCCRIQIPGIMNDE |
| SIRPaecd | KFNLKLVIKPAKVTPAPTRQRDFTAAFPRMLTTRGHGPAETQTLGSLPDINL |
| | TQISTLANELRDSRLANDLRDSGATIRIGASTKGPSVFPLAPSSKSTSGGTAA |
| | LGCLVKDYFPEPVTVSWNSGALTSGVHTFPAVLQSSGLYSLSSVVTVPSSSL |
| | GTQTYICNVNHKPSNTKVDKKVEPKSCDKTHTCPPCPAPELLGGPSVFLFPP |
| | KPKDTLMISRTPEVTCVVVDVSHEDPEVKFNWYVDGVEVHNAKTKPREEQ |
| | YNSTYRVVSVLTVLHQDWLNGKEYKCKVSNKALPAPIEKTISKAKGQPRE |
| | PQVYTLPPSREEMTKNQVSLTCLVKGFYPSDIAVEWESNGQPENNYKTTPP |
| | VLDSDGSFFLYSKLTVDKSRWQQGNVFSCSVMHEALHNHYTQKSLSLSPG |
| | KGGGGSGGGGSGGGGSEEELQVIQPDKSVLVAAGETATLRCTATSLIPVGPI |
| | QWFRGAGPGRELIYNQKEGHFPRVTTVSDLTKRNNMDFSIRIGNITPADAG |
| | TYYCVKFRKGSPDDVEFKSGAGTELSVRAKPS |
| SEQ ID NO: 563 | SEVEYRAEVGQNAYLPCFYTPAAPGNLVPVCWGKGACPVFECGNVVLRT |
| TIM3ecd-Fc- | DERDVNYWTSRYWLNGDFRKGDVSLTIENVTLADSGIYCCRIQIPGIMNDE |
| TGFbRecd | KFNLKLVIKPAKVTPAPTRQRDFTAAFPRMLTTRGHGPAETQTLGSLPDINL |
| | TQISTLANELRDSRLANDLRDSGATIRIGASTKGPSVFPLAPSSKSTSGGTAA |
| | LGCLVKDYFPEPVTVSWNSGALTSGVHTFPAVLQSSGLYSLSSVVTVPSSSL |
| | GTQTYICNVNHKPSNTKVDKKVEPKSCDKTHTCPPCPAPELLGGPSVFLFPP |
| | KPKDTLMISRTPEVTCVVVDVSHEDPEVKFNWYVDGVEVHNAKTKPREEQ |
| | YNSTYRVVSVLTVLHQDWLNGKEYKCKVSNKALPAPIEKTISKAKGQPRE |
| | PQVYTLPPSREEMTKNQVSLTCLVKGFYPSDIAVEWESNGQPENNYKTTPP |
| | VLDSDGSFFLYSKLTVDKSRWQQGNVFSCSVMHEALHNHYTQKSLSLSPG |
| | KGGGGSGGGGSGGGGSTIPPHVQKSVNNDMIVTDNNGAVKFPQLCKFCDV |
| | RFSTCDNQKSCMSNCSITSICEKPQEVCVAVWRKNDENITLETVCHDPKLP |
| | YHDFILEDAASPKCIMKEKKKPGETFFMCSCSSDECNDNIIFSEEYNTSNPD |
| SEQ ID NO: 564 | SEVEYRAEVGQNAYLPCFYTPAAPGNLVPVCWGKGACPVFECGNVVLRT |
| TIM3ecd-Fc- | DERDVNYWTSRYWLNGDFRKGDVSLTIENVTLADSGIYCCRIQIPGIMNDE |
| VEGFRecd | KFNLKLVIKPAKVTPAPTRQRDFTAAFPRMLTTRGHGPAETQTLGSLPDINL |
| | TQISTLANELRDSRLANDLRDSGATIRIGASTKGPSVFPLAPSSKSTSGGTAA |
| | LGCLVKDYFPEPVTVSWNSGALTSGVHTFPAVLQSSGLYSLSSVVTVPSSSL |
| | GTQTYICNVNHKPSNTKVDKKVEPKSCDKTHTCPPCPAPELLGGPSVFLFPP |
| | KPKDTLMISRTPEVTCVVVDVSHEDPEVKFNWYVDGVEVHNAKTKPREEQ |
| | YNSTYRVVSVLTVLHQDWLNGKEYKCKVSNKALPAPIEKTISKAKGQPRE |
| | PQVYTLPPSREEMTKNQVSLTCLVKGFYPSDIAVEWESNGQPENNYKTTPP |
| | VLDSDGSFFLYSKLTVDKSRWQQGNVFSCSVMHEALHNHYTQKSLSLSPG |
| | KGGGGSGGGGSGGGGSSDTGRPFVEMYSEIPEIIHMTEGRELVIPCRVTSPNI |
| | TVTLKKFPLDTLIPDGKRIIWDSRKGFIISNATYKEIGLLTCEATVNGHLYKT |
| | NYLTHRQTNTIIDVVLSPSHGIELSVGEKLVLNCTARTELNVGIDFNWEYPS |
| | SKHQHKKLVNRDLKTQSGSEMKKFLSTLTIDGVTRSDQGLYTCAASSGLM |
| | TKKNSTFVRVHEK |
| SEQ ID NO: 565 | SDTGRPFVEMYSEIPEIIHMTEGRELVIPCRVTSPNITVTLKKFPLDTLIPDGK |
| VEGFRecd-Fc - | RIIWDSRKGFIISNATYKEIGLLTCEATVNGHLYKTNYLTHRQTNTIIDVVLS |
| BTLAecd | PSHGIELSVGEKLVLNCTARTELNVGIDFNWEYPSSKHQHKKLVNRDLKTQ |
| | SGSEMKKFLSTLTIDGVTRSDQGLYTCAASSGLMTKKNSTFVRVHEKASTK |
| | GPSVFPLAPSSKSTSGGTAALGCLVKDYFPEPVTVSWNSGALTSGVHTFPA |
| | VLQSSGLYSLSSVVTVPSSSLGTQTYICNVNHKPSNTKVDKKVEPKSCDKT |
| | HTCPPCPAPELLGGPSVFLFPPKPKDTLMISRTPEVTCVVVDVSHEDPEVKF |
| | NWYVDGVEVHNAKTKPREEQYNSTYRVVSVLTVLHQDWLNGKEYKCKV |
| | SNKALPAPIEKTISKAKGQPREPQVYTLPPSREEMTKNQVSLTCLVKGFYPS |
| | DIAVEWESNGQPENNYKTTPPVLDSDGSFFLYSKLTVDKSRWQQGNVFSCS |
| | VMHEALHNHYTQKSLSLSPGKGGGGSGGGGSGGGGSKESCDVQLYIKRQS |
| | EHSILAGDPFELECPVKYCANRPHVTWCKLNGTTCVKLEDRQTSWKEEKNI |
| | SFFILHFEPVLPNDNGSYRCSANFQSNLIESHSTTLYVTDVKSASERPSKDEM |
| | AS |
| SEQ ID NO: 566 | SDTGRPFVEMYSEIPEIIHMTEGRELVIPCRVTSPNITVTLKKFPLDTLIPDGK |
| VEGFRecd-Fc - | RIIWDSRKGFIISNATYKEIGLLTCEATVNGHLYKTNYLTHRQTNTIIDVVLS |
| PD1ecd | PSHGIELSVGEKLVLNCTARTELNVGIDFNWEYPSSKHQHKKLVNRDLKTQ |
| | SGSEMKKFLSTLTIDGVTRSDQGLYTCAASSGLMTKKNSTFVRVHEKASTK |
| | GPSVFPLAPSSKSTSGGTAALGCLVKDYFPEPVTVSWNSGALTSGVHTFPA |
| | VLQSSGLYSLSSVVTVPSSSLGTQTYICNVNHKPSNTKVDKKVEPKSCDKT |
| | HTCPPCPAPELLGGPSVFLFPPKPKDTLMISRTPEVTCVVVDVSHEDPEVKF |
| | NWYVDGVEVHNAKTKPREEQYNSTYRVVSVLTVLHQDWLNGKEYKCKV |
| | SNKALPAPIEKTISKAKGQPREPQVYTLPPSREEMTKNQVSLTCLVKGFYPS |
| | DIAVEWESNGQPENNYKTTPPVLDSDGSFFLYSKLTVDKSRWQQGNVFSCS |
| | VMHEALHNHYTQKSLSLSPGKGGGGSGGGGSGGGGSPGWFLDSPDRPWN |
| | PPTFSPALLVVTEGDNATFTCSFSNTSESFVLNWYRMSPSNQTDKLAAFPED |
| | RSQPGQDCRFRVTQLPNGRDFHMSVVRARRNDSGTYLCGAISLAPKAQIKE |
| | SLRAELRVTERRAEVPTAHPSPSPRPAGQFQTLV |
| SEQ ID NO: 567 | SDTGRPFVEMYSEIPEIIHMTEGRELVIPCRVTSPNITVTLKKFPLDTLIPDGK |
| VEGFRecd-Fc- | RIIWDSRKGFIISNATYKEIGLLTCEATVNGHLYKTNYLTHRQTNTIIDVVLS |
| SIGLEC10ecd | PSHGIELSVGEKLVLNCTARTELNVGIDFNWEYPSSKHQHKKLVNRDLKTQ |
| | SGSEMKKFLSTLTIDGVTRSDQGLYTCAASSGLMTKKNSTFVRVHEKASTK |
| | GPSVFPLAPSSKSTSGGTAALGCLVKDYFPEPVTVSWNSGALTSGVHTFPA |
| | VLQSSGLYSLSSVVTVPSSSLGTQTYICNVNHKPSNTKVDKKVEPKSCDKT |
| | HTCPPCPAPELLGGPSVFLFPPKPKDTLMISRTPEVTCVVVDVSHEDPEVKF |
| | NWYVDGVEVHNAKTKPREEQYNSTYRVVSVLTVLHQDWLNGKEYKCKV |
| | SNKALPAPIEKTISKAKGQPREPQVYTLPPSREEMTKNQVSLTCLVKGFYPS |
| | DIAVEWESNGQPENNYKTTPPVLDSDGSFFLYSKLTVDKSRWQQGNVFSCS |
| | VMHEALHNHYTQKSLSLSPGKGGGGSGGGGSGGGGSMDGRFWIRVQESV |
| | MVPEGLCISVPCSFSYPRQDWTGSTPAYGYWFKAVTETTKGAPVATNHQS |
| | REVEMSTRGRFQLTGDPAKGNCSLVIRDAQMQDESQYFFRVERGSYVRYN |
| | FMNDGFFLKVTALTQKPDVYIPETLEPGQPVTVICVFNWAFEECPPPSFSWT |
| | GAALSSQGTKPTTSHFSVLSFTPRPQDHNTDLTCHVDFSRKGVSAQRTVRL |
| | RVAYAPRDLVISISRDNTPALEPQPQGNVPYLEAQKGQFLRLLCAADSQPP |
| | ATLSWVLQNRVLSSSHPWGPRPLGLELPGVKAGDSGRYTCRAENRLGSQQ |
| | RALDLSVQYPPENLRVMVSQANRTVLENLGNGTSLPVLEGQSLCLVCVTH |
| | SSPPARLSWTQRGQVLSPSQPSDPGVLELPRVQVEHEGEFTCHARHPLGSQ |
| | HVSLSLSVHYSPKLLGPSCSWEAEGLHCSCSSQASPAPSLRWWLGEELLEG |
| | NSSQDSFEVTPSSAGPWANSSLSLHGGLSSGLRLRCEAWNVHGAQSGSILQ |
| | LPDKKGLIST |
| SEQ ID NO: 568 | SDTGRPFVEMYSEIPEIIHMTEGRELVIPCRVTSPNITVTLKKFPLDTLIPDGK |
| VEGFRecd-Fc- | RIIWDSRKGFIISNATYKEIGLLTCEATVNGHLYKTNYLTHRQTNTIIDVVLS |
| SIRPaecd | PSHGIELSVGEKLVLNCTARTELNVGIDFNWEYPSSKHQHKKLVNRDLKTQ |
| | SGSEMKKFLSTLTIDGVTRSDQGLYTCAASSGLMTKKNSTFVRVHEKASTK |
| | GPSVFPLAPSSKSTSGGTAALGCLVKDYFPEPVTVSWNSGALTSGVHTFPA |
| | VLQSSGLYSLSSVVTVPSSSLGTQTYICNVNHKPSNTKVDKKVEPKSCDKT |
| | HTCPPCPAPELLGGPSVFLFPPKPKDTLMISRTPEVTCVVVDVSHEDPEVKF |
| | NWYVDGVEVHNAKTKPREEQYNSTYRVVSVLTVLHQDWLNGKEYKCKV |
| | SNKALPAPIEKTISKAKGQPREPQVYTLPPSREEMTKNQVSLTCLVKGFYPS |
| | DIAVEWESNGQPENNYKTTPPVLDSDGSFFLYSKLTVDKSRWQQGNVFSCS |
| | VMHEALHNHYTQKSLSLSPGKGGGGSGGGGSGGGGSEEELQVIQPDKSVL |
| | VAAGETATLRCTATSLIPVGPIQWFRGAGPGRELIYNQKEGHFPRVTTVSDL |
| | TKRNNMDFSIRIGNITPADAGTYYCVKFRKGSPDDVEFKSGAGTELSVRAK |
| | PS |
| SEQ ID NO: 569 | SDTGRPFVEMYSEIPEIIHMTEGRELVIPCRVTSPNITVTLKKFPLDTLIPDGK |
| VEGFRecd-Fc- | RIIWDSRKGFIISNATYKEIGLLTCEATVNGHLYKTNYLTHRQTNTIIDVVLS |
| TGFbRecd | PSHGIELSVGEKLVLNCTARTELNVGIDFNWEYPSSKHQHKKLVNRDLKTQ |
| | SGSEMKKFLSTLTIDGVTRSDQGLYTCAASSGLMTKKNSTFVRVHEKASTK |
| | GPSVFPLAPSSKSTSGGTAALGCLVKDYFPEPVTVSWNSGALTSGVHTFPA |
| | VLQSSGLYSLSSVVTVPSSSLGTQTYICNVNHKPSNTKVDKKVEPKSCDKT |
| | HTCPPCPAPELLGGPSVFLFPPKPKDTLMISRTPEVTCVVVDVSHEDPEVKF |
| | NWYVDGVEVHNAKTKPREEQYNSTYRVVSVLTVLHQDWLNGKEYKCKV |
| | SNKALPAPIEKTISKAKGQPREPQVYTLPPSREEMTKNQVSLTCLVKGFYPS |
| | DIAVEWESNGQPENNYKTTPPVLDSDGSFFLYSKLTVDKSRWQQGNVFSCS |
| | VMHEALHNHYTQKSLSLSPGKGGGGSGGGGSGGGGSTIPPHVQKSVNND |
| | MIVTDNNGAVKFPQLCKFCDVRFSTCDNQKSCMSNCSITSICEKPQEVCVA |
| | VWRKNDENITLETVCHDPKLPYHDFILEDAASPKCIMKEKKKPGETFFMCS |
| | CSSDECNDNIIFSEEYNTSNPD |
| SEQ ID NO: 570 | SDTGRPFVEMYSEIPEIIHMTEGRELVIPCRVTSPNITVTLKKFPLDTLIPDGK |
| VEGFRecd-Fc - | RIIWDSRKGFIISNATYKEIGLLTCEATVNGHLYKTNYLTHRQTNTIIDVVLS |
| TIM3ecd | PSHGIELSVGEKLVLNCTARTELNVGIDFNWEYPSSKHQHKKLVNRDLKTQ |
| | SGSEMKKFLSTLTIDGVTRSDQGLYTCAASSGLMTKKNSTFVRVHEKASTK |
| | GPSVFPLAPSSKSTSGGTAALGCLVKDYFPEPVTVSWNSGALTSGVHTFPA |
| | VLQSSGLYSLSSVVTVPSSSLGTQTYICNVNHKPSNTKVDKKVEPKSCDKT |
| | HTCPPCPAPELLGGPSVFLFPPKPKDTLMISRTPEVTCVVVDVSHEDPEVKF |
| | NWYVDGVEVHNAKTKPREEQYNSTYRVVSVLTVLHQDWLNGKEYKCKV |
| | SNKALPAPIEKTISKAKGQPREPQVYTLPPSREEMTKNQVSLTCLVKGFYPS |
| | DIAVEWESNGQPENNYKTTPPVLDSDGSFFLYSKLTVDKSRWQQGNVFSCS |
| | VMHEALHNHYTQKSLSLSPGKGGGGSGGGGSGGGGSSEVEYRAEVGQNA |
| | YLPCFYTPAAPGNLVPVCWGKGACPVFECGNVVLRTDERDVNYWTSRYW |
| | LNGDFRKGDVSLTIENVTLADSGIYCCRIQIPGIMNDEKFNLKLVIKPAKVTP |
| | APTRQRDFTAAFPRMLTTRGHGPAETQTLGSLPDINLTQISTLANELRDSRL |
| | ANDLRDSGATIRIG |
| SEQ ID NO: 571 | KESCDVQLYIKRQSEHSILAGDPFELECPVKYCANRPHVTWCKLNGTTCVK |
| BTLAecd-Fc- | LEDRQTSWKEEKNISFFILHFEPVLPNDNGSYRCSANFQSNLIESHSTTLYVT |
| IL12ecd | DVKSASERPSKDEMASASTKGPSVFPLAPCSRSTSESTAALGCLVKDYFPEP |
| | VTVSWNSGALTSGVHTFPAVLQSSGLYSLSSVVTVPSSSLGTKTYTCNVDH |
| | KPSNTKVDKRVESKYGPPCPSCPAPEFLGGPSVFLFPPKPKDTLMISRTPEVT |
| | CVVVDVSQEDPEVQFNWYVDGVEVHNAKTKPREEQFNSTYRVVSVLTVL |
| | HQDWLNGKEYKCKVSNKGLPSSIEKTISKAKGQPREPQVYTLPPSQEEMTK |
| | NQVSLTCLVKGFYPSDIAVEWESNGQPENNYKTTPPVLDSDGSFFLYSRLT |
| | VDKSRWQEGNVFSCSVMHEALHNHYTQKSLSLSLGKGGGGSGGGGSGGG |
| | GSIWELKKDVYVVELDWYPDAPGEMVVLTCDTPEEDGITWTLDQSSEVLG |
| | SGKTLTIQVKEFGDAGQYTCHKGGEVLSHSLLLLHKKEDGIWSTDILKDQK |
| | EPKNKTFLRCEAKNYSGRFTCWWLTTISTDLTFSVKSSRGSSDPQGVTCGA |
| | ATLSAERVRGDNKEYEYSVECQEDSACPAAEESLPIEVMVDAVHKLKYEN |
| | YTSSFFIRDIIKPDPPKNLQLKPLKNSRQVEVSWEYPDTWSTPHSYFSLTFCV |
| | QVQGKSKREKKDRVFTDKTSATVICRKNASISVRAQDRYYSSSWSEWASV |
| | PCSGGGGSGGGGSGGGGSRNLPVATPDPGMFPCLHHSQNLLRAVSNMLQK |
| | ARQTLEFYPCTSEEIDHEDITKDKTSTVEACLPLELTKNESCLNSRETSFITN |
| | GSCLASRKTSFMNIALCLSSIYEDLKMYQVEFKTMNAKLLMDPKRQIFLDQ |
| | NMLAVIDELMQALNFNSETVPQKSSLEEPDFYKTKIKLCILLHAFRIRAVTID |
| | RVMSYLNAS |
| SEQ ID NO: 572 | IWELKKDVYVVELDWYPDAPGEMVVLTCDTPEEDGITWTLDQSSEVLGSG |
| IL12ecd-Fc- | KTLTIQVKEFGDAGQYTCHKGGEVLSHSLLLLHKKEDGIWSTDILKDQKEP |
| BTLAecd | KNKTFLRCEAKNYSGRFTCWWLTTISTDLTFSVKSSRGSSDPQGVTCGAAT |
| | LSAERVRGDNKEYEYSVECQEDSACPAAEESLPIEVMVDAVHKLKYENYT |
| | SSFFIRDIIKPDPPKNLQLKPLKNSRQVEVSWEYPDTWSTPHSYFSLTFCVQV |
| | QGKSKREKKDRVFTDKTSATVICRKNASISVRAQDRYYSSSWSEWASVPCS |
| | GGGGSGGGGSGGGGSRNLPVATPDPGMFPCLHHSQNLLRAVSNMLQKAR |
| | QTLEFYPCTSEEIDHEDITKDKTSTVEACLPLELTKNESCLNSRETSFITNGSC |
| | LASRKTSFMNIALCLSSIYEDLKMYQVEFKTMNAKLLMDPKRQIFLDQNML |
| | AVIDELMQALNFNSETVPQKSSLEEPDFYKTKIKLCILLHAFRIRAVTIDRV |
| | MSYLNASASTKGPSVFPLAPCSRSTSESTAALGCLVKDYFPEPVTVSWNSG |
| | ALTSGVHTFPAVLQSSGLYSLSSVVTVPSSSLGTKTYTCNVDHKPSNTKVD |
| | KRVESKYGPPCPSCPAPEFLGGPSVFLFPPKPKDTLMISRTPEVTCVVVDVS |
| | QEDPEVQFNWYVDGVEVHNAKTKPREEQFNSTYRVVSVLTVLHQDWLNG |
| | KEYKCKVSNKGLPSSIEKTISKAKGQPREPQVYTLPPSQEEMTKNQVSLTCL |
| | VKGFYPSDIAVEWESNGQPENNYKTTPPVLDSDGSFFLYSRLTVDKSRWQE |
| | GNVFSCSVMHEALHNHYTQKSLSLSLGKGGGGSGGGGSGGGGSKESCDV |
| | QLYIKRQSEHSILAGDPFELECPVKYCANRPHVTWCKLNGTTCVKLEDRQT |
| | SWKEEKNISFFILHEEPVLPNDNGSYRCSANFQSNLIESHSTTLYVTDVKSAS |
| | ERPSKDEMAS |
| SEQ ID NO: 573 | KESCDVQLYIKRQSEHSILAGDPFELECPVKYCANRPHVTWCKLNGTTCVK |
| BTLAecd-Fc- | LEDRQTSWKEEKNISFFILHFEPVLPNDNGSYRCSANFQSNLIESHSTTLYVT |
| IL15ecd | DVKSASERPSKDEMASASTKGPSVFPLAPCSRSTSESTAALGCLVKDYFPEP |
| | VTVSWNSGALTSGVHTFPAVLQSSGLYSLSSVVTVPSSSLGTKTYTCNVDH |
| | KPSNTKVDKRVESKYGPPCPSCPAPEFLGGPSVFLFPPKPKDTLMISRTPEVT |
| | CVVVDVSQEDPEVQFNWYVDGVEVHNAKTKPREEQFNSTYRVVSVLTVL |
| | HQDWLNGKEYKCKVSNKGLPSSIEKTISKAKGQPREPQVYTLPPSQEEMTK |
| | NQVSLTCLVKGFYPSDIAVEWESNGQPENNYKTTPPVLDSDGSFFLYSRLT |
| | VDKSRWQEGNVFSCSVMHEALHNHYTQKSLSLSLGKGGGGSGGGGSGGG |
| | GSNWVNVISDLKKIEDLIQSMHIDATLYTESDVHPSCKVTAMKCFLLELQVI |
| | SLESGDASIHDTVENLIILANNSLSSNGNVTESGCKECEELEEKNIKEFLQSF |
| | VHIVQMFINTS |
| SEQ ID NO: 574 | NWVNVISDLKKIEDLIQSMHIDATLYTESDVHPSCKVTAMKCFLLELQVISL |
| IL15ecd-Fc- | ESGDASIHDTVENLIILANNSLSSNGNVTESGCKECEELEEKNIKEFLQSFVH |
| BTLAecd | IVQMFINTSASTKGPSVFPLAPCSRSTSESTAALGCLVKDYFPEPVTVSWNS |
| | GALTSGVHTFPAVLQSSGLYSLSSVVTVPSSSLGTKTYTCNVDHKPSNTKV |
| | DKRVESKYGPPCPSCPAPEFLGGPSVFLFPPKPKDTLMISRTPEVTCVVVDV |
| | SQEDPEVQFNWYVDGVEVHNAKTKPREEQFNSTYRVVSVLTVLHQDWLN |
| | GKEYKCKVSNKGLPSSIEKTISKAKGQPREPQVYTLPPSQEEMTKNQVSLTC |
| | LVKGFYPSDIAVEWESNGQPENNYKTTPPVLDSDGSFFLYSRLTVDKSRWQ |
| | EGNVFSCSVMHEALHNHYTQKSLSLSLGKGGGGSGGGGSGGGGSKESCDV |
| | QLYIKRQSEHSILAGDPFELECPVKYCANRPHVTWCKLNGTTCVKLEDRQT |
| | SWKEEKNISFFILHEEPVLPNDNGSYRCSANFQSNLIESHSTTLYVTDVKSAS |
| | ERPSKDEMAS |
| SEQ ID NO: 575 | PGWFLDSPDRPWNPPTFSPALLVVTEGDNATFTCSFSNTSESFVLNWYRMS |
| PD1ecd-Fc- | PSNQTDKLAAFPEDRSQPGQDCRFRVTQLPNGRDFHMSVVRARRNDSGTY |
| IL12ecd | LCGAISLAPKAQIKESLRAELRVTERRAEVPTAHPSPSPRPAGQFQTLVAST |
| | KGPSVFPLAPCSRSTSESTAALGCLVKDYFPEPVTVSWNSGALTSGVHTFPA |
| | VLQSSGLYSLSSVVTVPSSSLGTKTYTCNVDHKPSNTKVDKRVESKYGPPC |
| | PSCPAPEFLGGPSVFLFPPKPKDTLMISRTPEVTCVVVDVSQEDPEVQFNWY |
| | VDGVEVHNAKTKPREEQFNSTYRVVSVLTVLHQDWLNGKEYKCKVSNKG |
| | LPSSIEKTISKAKGQPREPQVYTLPPSQEEMTKNQVSLTCLVKGFYPSDIAVE |
| | WESNGQPENNYKTTPPVLDSDGSFFLYSRLTVDKSRWQEGNVFSCSVMHE |
| | ALHNHYTQKSLSLSLGKGGGGSGGGGSGGGGSIWELKKDVYVVELDWYP |
| | DAPGEMVVLTCDTPEEDGITWTLDQSSEVLGSGKTLTIQVKEFGDAGQYTC |
| | HKGGEVLSHSLLLLHKKEDGIWSTDILKDQKEPKNKTFLRCEAKNYSGRFT |
| | CWWLTTISTDLTFSVKSSRGSSDPQGVTCGAATLSAERVRGDNKEYEYSVE |
| | CQEDSACPAAEESLPIEVMVDAVHKLKYENYTSSFFIRDIIKPDPPKNLQLKP |
| | LKNSRQVEVSWEYPDTWSTPHSYFSLTFCVQVQGKSKREKKDRVFTDKTS |
| | ATVICRKNASISVRAQDRYYSSSWSEWASVPCSGGGGSGGGGSGGGGSRN |
| | LPVATPDPGMFPCLHHSQNLLRAVSNMLQKARQTLEFYPCTSEEIDHEDIT |
| | KDKTSTVEACLPLELTKNESCLNSRETSFITNGSCLASRKTSFMMALCLSSIY |
| | EDLKMYQVEFKTMNAKLLMDPKRQIFLDQNMLAVIDELMQALNFNSETV |
| | PQKSSLEEPDFYKTKIKLCILLHAFRIRAVTIDRVMSYLNAS |
| SEQ ID NO: 576 | IWELKKDVYVVELDWYPDAPGEMVVLTCDTPEEDGITWTLDQSSEVLGSG |
| IL12ecd-Fc- | KTLTIQVKEFGDAGQYTCHKGGEVLSHSLLLLHKKEDGIWSTDILKDQKEP |
| PD1ecd | KNKTFLRCEAKNYSGRFTCWWLTTISTDLTFSVKSSRGSSDPQGVTCGAAT |
| | LSAERVRGDNKEYEYSVECQEDSACPAAEESLPIEVMVDAVHKLKYENYT |
| | SSFFIRDIIKPDPPKNLQLKPLKNSRQVEVSWEYPDTWSTPHSYFSLTFCVQV |
| | QGKSKREKKDRVFTDKTSATVICRKNASISVRAQDRYYSSSWSEWASVPCS |
| | GGGGSGGGGSGGGGSRNLPVATPDPGMFPCLHHSQNLLRAVSNMLQKAR |
| | QTLEFYPCTSEEIDHEDITKDKTSTVEACLPLELTKNESCLNSRETSFITNGSC |
| | LASRKTSFMMALCLSSIYEDLKMYQVEFKTMNAKLLMDPKRQIFLDQNML |
| | AVIDELMQALNFNSETVPQKSSLEEPDFYKTKIKLCILLHAFRIRAVTIDRV |
| | MSYLNASASTKGPSVFPLAPCSRSTSESTAALGCLVKDYFPEPVTVSWNSG |
| | ALTSGVHTFPAVLQSSGLYSLSSVVTVPSSSLGTKTYTCNVDHKPSNTKVD |
| | KRVESKYGPPCPSCPAPEFLGGPSVFLFPPKPKDTLMISRTPEVTCVVVDVS |
| | QEDPEVQFNWYVDGVEVHNAKTKPREEQFNSTYRVVSVLTVLHQDWLNG |
| | KEYKCKVSNKGLPSSIEKTISKAKGQPREPQVYTLPPSQEEMTKNQVSLTCL |
| | VKGFYPSDIAVEWESNGQPENNYKTTPPVLDSDGSFFLYSRLTVDKSRWQE |
| | GNVFSCSVMHEALHNHYTQKSLSLSLGKGGGGSGGGGSGGGGSPGWFLD |
| | SPDRPWNPPTFSPALLVVTEGDNATFTCSFSNTSESFVLNWYRMSPSNQTD |
| | KLAAFPEDRSQPGQDCRFRVTQLPNGRDFHMSVVRARRNDSGTYLCGAIS |
| | LAPKAQIKESLRAELRVTERRAEVPTAHPSPSPRPAGQFQTLV |
| SEQ ID NO: 577 | PGWFLDSPDRPWNPPTFSPALLVVTEGDNATFTCSFSNTSESFVLNWYRMS |
| PD1ecd-Fc- | PSNQTDKLAAFPEDRSQPGQDCRFRVTQLPNGRDFHMSVVRARRNDSGTY |
| IL15ecd | LCGAISLAPKAQIKESLRAELRVTERRAEVPTAHPSPSPRPAGQFQTLVAST |
| | KGPSVFPLAPCSRSTSESTAALGCLVKDYFPEPVTVSWNSGALTSGVHTFPA |
| | VLQSSGLYSLSSVVTVPSSSLGTKTYTCNVDHKPSNTKVDKRVESKYGPPC |
| | PSCPAPEFLGGPSVFLFPPKPKDTLMISRTPEVTCVVVDVSQEDPEVQFNWY |
| | VDGVEVHNAKTKPREEQFNSTYRVVSVLTVLHQDWLNGKEYKCKVSNKG |
| | LPSSIEKTISKAKGQPREPQVYTLPPSQEEMTKNQVSLTCLVKGFYPSDIAVE |
| | WESNGQPENNYKTTPPVLDSDGSFFLYSRLTVDKSRWQEGNVFSCSVMHE |
| | ALHNHYTQKSLSLSLGKGGGGSGGGGSGGGGSNWVNVISDLKKIEDLIQS |
| | MHIDATLYTESDVHPSCKVTAMKCFLLELQVISLESGDASIHDTVENLIILA |
| | NNSLSSNGNVTESGCKECEELEEKNIKEFLQSFVHIVQMFINTS |
| SEQ ID NO: 578 | NWVNVISDLKKIEDLIQSMHIDATLYTESDVHPSCKVTAMKCFLLELQVISL |
| IL15ecd-Fc- | ESGDASIHDTVENLIILANNSLSSNGNVTESGCKECEELEEKNIKEFLQSFVH |
| PD1ecd | IVQMFINTSASTKGPSVFPLAPCSRSTSESTAALGCLVKDYFPEPVTVSWNS |
| | GALTSGVHTFPAVLQSSGLYSLSSVVTVPSSSLGTKTYTCNVDHKPSNTKV |
| | DKRVESKYGPPCPSCPAPEFLGGPSVFLFPPKPKDTLMISRTPEVTCVVVDV |
| | SQEDPEVQFNWYVDGVEVHNAKTKPREEQFNSTYRVVSVLTVLHQDWLN |
| | GKEYKCKVSNKGLPSSIEKTISKAKGQPREPQVYTLPPSQEEMTKNQVSLTC |
| | LVKGFYPSDIAVEWESNGQPENNYKTTPPVLDSDGSFFLYSRLTVDKSRWQ |
| | EGNVFSCSVMHEALHNHYTQKSLSLSLGKGGGGSGGGGSGGGGSPGWFL |
| | DSPDRPWNPPTFSPALLVVTEGDNATFTCSFSNTSESFVLNWYRMSPSNQT |
| | DKLAAFPEDRSQPGQDCRFRVTQLPNGRDFHMSVVRARRNDSGTYLCGAI |
| | SLAPKAQIKESLRAELRVTERRAEVPTAHPSPSPRPAGQFQTLV |
| SEQ ID NO: 579 | MDGRFWIRVQESVMVPEGLCISVPCSFSYPRQDWTGSTPAYGYWFKAVTE |
| SIGLEC10ecd- | TTKGAPVATNHQSREVEMSTRGRFQLTGDPAKGNCSLVIRDAQMQDESQY |
| Fc-IL12ecd | FFRVERGSYVRYNFMNDGFFLKVTALTQKPDVYIPETLEPGQPVTVICVFN |
| | WAFEECPPPSFSWTGAALSSQGTKPTTSHFSVLSFTPRPQDHNTDLTCHVDF |
| | SRKGVSAQRTVRLRVAYAPRDLVISISRDNTPALEPQPQGNVPYLEAQKGQ |
| | FLRLLCAADSQPPATLSWVLQNRVLSSSHPWGPRPLGLELPGVKAGDSGRY |
| | TCRAENRLGSQQRALDLSVQYPPENLRVMVSQANRTVLENLGNGTSLPVL |
| | EGQSLCLVCVTHSSPPARLSWTQRGQVLSPSQPSDPGVLELPRVQVEHEGE |
| | FTCHARHPLGSQHVSLSLSVHYSPKLLGPSCSWEAEGLHCSCSSQASPAPSL |
| | RWWLGEELLEGNSSQDSFEVTPSSAGPWANSSLSLHGGLSSGLRLRCEAW |
| | NVHGAQSGSILQLPDKKGLISTASTKGPSVFPLAPCSRSTSESTAALGCLVK |
| | DYFPEPVTVSWNSGALTSGVHTFPAVLQSSGLYSLSSVVTVPSSSLGTKTYT |
| | CNVDHKPSNTKVDKRVESKYGPPCPSCPAPEFLGGPSVFLFPPKPKDTLMIS |
| | RTPEVTCVVVDVSQEDPEVQFNWYVDGVEVHNAKTKPREEQFNSTYRVV |
| | SVLTVLHQDWLNGKEYKCKVSNKGLPSSIEKTISKAKGQPREPQVYTLPPS |
| | QEEMTKNQVSLTCLVKGFYPSDIAVEWESNGQPENNYKTTPPVLDSDGSFF |
| | LYSRLTVDKSRWQEGNVFSCSVMHEALHNHYTQKSLSLSLGKGGGGSGG |
| | GGSGGGGSIWELKKDVYVVELDWYPDAPGEMVVLTCDTPEEDGITWTLD |
| | QSSEVLGSGKTLTIQVKEFGDAGQYTCHKGGEVLSHSLLLLHKKEDGIWST |
| | DILKDQKEPKNKTFLRCEAKNYSGRFTCWWLTTISTDLTFSVKSSRGSSDPQ |
| | GVTCGAATLSAERVRGDNKEYEYSVECQEDSACPAAEESLPIEVMVDAVH |
| | KLKYENYTSSFFIRDIIKPDPPKNLQLKPLKNSRQVEVSWEYPDTWSTPHSY |
| | FSLTFCVQVQGKSKREKKDRVFTDKTSATVICRKNASISVRAQDRYYSSSW |
| | SEWASVPCSGGGGSGGGGSGGGGSRNLPVATPDPGMFPCLHHSQNLLRAV |
| | SNMLQKARQTLEFYPCTSEEIDHEDITKDKTSTVEACLPLELTKNESCLNSR |
| | ETSFITNGSCLASRKTSFMMALCLSSIYEDLKMYQVEFKTMNAKLLMDPKR |
| | QIFLDQNMLAVIDELMQALNFNSETVPQKSSLEEPDFYKTKIKLCILLHAFRI |
| | RAVTIDRVMSYLNAS |
| SEQ ID NO: 580 | IWELKKDVYVVELDWYPDAPGEMVVLTCDTPEEDGITWTLDQSSEVLGSG |
| IL12ecd-Fc- | KTLTIQVKEFGDAGQYTCHKGGEVLSHSLLLLHKKEDGIWSTDILKDQKEP |
| SIGLEC10ecd | KNKTFLRCEAKNYSGRFTCWWLTTISTDLTFSVKSSRGSSDPQGVTCGAAT |
| | LSAERVRGDNKEYEYSVECQEDSACPAAEESLPIEVMVDAVHKLKYENYT |
| | SSFFIRDIIKPDPPKNLQLKPLKNSRQVEVSWEYPDTWSTPHSYFSLTFCVQV |
| | QGKSKREKKDRVFTDKTSATVICRKNASISVRAQDRYYSSSWSEWASVPCS |
| | GGGGSGGGGSGGGGSRNLPVATPDPGMFPCLHHSQNLLRAVSNMLQKAR |
| | QTLEFYPCTSEEIDHEDITKDKTSTVEACLPLELTKNESCLNSRETSFITNGSC |
| | LASRKTSFMMALCLSSIYEDLKMYQVEFKTMNAKLLMDPKRQIFLDQNML |
| | AVIDELMQALNFNSETVPQKSSLEEPDFYKTKIKLCILLHAFRIRAVTIDRV |
| | MSYLNASASTKGPSVFPLAPCSRSTSESTAALGCLVKDYFPEPVTVSWNSG |
| | ALTSGVHTFPAVLQSSGLYSLSSVVTVPSSSLGTKTYTCNVDHKPSNTKVD |
| | KRVESKYGPPCPSCPAPEFLGGPSVFLFPPKPKDTLMISRTPEVTCVVVDVS |
| | QEDPEVQFNWYVDGVEVHNAKTKPREEQFNSTYRVVSVLTVLHQDWLNG |
| | KEYKCKVSNKGLPSSIEKTISKAKGQPREPQVYTLPPSQEEMTKNQVSLTCL |
| | VKGFYPSDIAVEWESNGQPENNYKTTPPVLDSDGSFFLYSRLTVDKSRWQE |
| | GNVFSCSVMHEALHNHYTQKSLSLSLGKGGGGSGGGGSGGGGSMDGRFW |
| | IRVQESVMVPEGLCISVPCSFSYPRQDWTGSTPAYGYWFKAVTETTKGAPV |
| | ATNHQSREVEMSTRGRFQLTGDPAKGNCSLVIRDAQMQDESQYFFRVERG |
| | SYVRYNFMNDGFFLKVTALTQKPDVYIPETLEPGQPVTVICVFNWAFEECP |
| | PPSFSWTGAALSSQGTKPTTSHFSVLSFTPRPQDHNTDLTCHVDFSRKGVSA |
| | QRTVRLRVAYAPRDLVISISRDNTPALEPQPQGNVPYLEAQKGQFLRLLCA |
| | ADSQPPATLSWVLQNRVLSSSHPWGPRPLGLELPGVKAGDSGRYTCRAEN |
| | RLGSQQRALDLSVQYPPENLRVMVSQANRTVLENLGNGTSLPVLEGQSLC |
| | LVCVTHSSPPARLSWTQRGQVLSPSQPSDPGVLELPRVQVEHEGEFTCHAR |
| | HPLGSQHVSLSLSVHYSPKLLGPSCSWEAEGLHCSCSSQASPAPSLRWWLG |
| | EELLEGNSSQDSFEVTPSSAGPWANSSLSLHGGLSSGLRLRCEAWNVHGAQ |
| | SGSILQLPDKKGLIST |
| SEQ ID NO: 581 | MDGRFWIRVQESVMVPEGLCISVPCSFSYPRQDWTGSTPAYGYWFKAVTE |
| SIGLEC10ecd- | TTKGAPVATNHQSREVEMSTRGRFQLTGDPAKGNCSLVIRDAQMQDESQY |
| Fc-IL15ecd | FFRVERGSYVRYNFMNDGFFLKVTALTQKPDVYIPETLEPGQPVTVICVFN |
| | WAFEECPPPSFSWTGAALSSQGTKPTTSHFSVLSFTPRPQDHNTDLTCHVDF |
| | SRKGVSAQRTVRLRVAYAPRDLVISISRDNTPALEPQPQGNVPYLEAQKGQ |
| | FLRLLCAADSQPPATLSWVLQNRVLSSSHPWGPRPLGLELPGVKAGDSGRY |
| | TCRAENRLGSQQRALDLSVQYPPENLRVMVSQANRTVLENLGNGTSLPVL |
| | EGQSLCLVCVTHSSPPARLSWTQRGQVLSPSQPSDPGVLELPRVQVEHEGE |
| | FTCHARHPLGSQHVSLSLSVHYSPKLLGPSCSWEAEGLHCSCSSQASPAPSL |
| | RWWLGEELLEGNSSQDSFEVTPSSAGPWANSSLSLHGGLSSGLRLRCEAW |
| | NVHGAQSGSILQLPDKKGLISTASTKGPSVFPLAPCSRSTSESTAALGCLVK |
| | DYFPEPVTVSWNSGALTSGVHTFPAVLQSSGLYSLSSVVTVPSSSLGTKTYT |
| | CNVDHKPSNTKVDKRVESKYGPPCPSCPAPEFLGGPSVFLFPPKPKDTLMIS |
| | RTPEVTCVVVDVSQEDPEVQFNWYVDGVEVHNAKTKPREEQFNSTYRVV |
| | SVLTVLHQDWLNGKEYKCKVSNKGLPSSIEKTISKAKGQPREPQVYTLPPS |
| | QEEMTKNQVSLTCLVKGFYPSDIAVEWESNGQPENNYKTTPPVLDSDGSFF |
| | LYSRLTVDKSRWQEGNVFSCSVMHEALHNHYTQKSLSLSLGKGGGGSGG |
| | GGSGGGGSNWVNVISDLKKIEDLIQSMHIDATLYTESDVHPSCKVTAMKCF |
| | LLELQVISLESGDASIHDTVENLIILANNSLSSNGNVTESGCKECEELEEKNI |
| | KEFLQSFVHIVQMFINTS |
| SEQ ID NO: 582 | NWVNVISDLKKIEDLIQSMHIDATLYTESDVHPSCKVTAMKCFLLELQVISL |
| IL15ecd-Fc- | ESGDASIHDTVENLIILANNSLSSNGNVTESGCKECEELEEKNIKEFLQSFVH |
| SIGLEC10ecd | IVQMFINTSASTKGPSVFPLAPCSRSTSESTAALGCLVKDYFPEPVTVSWNS |
| | GALTSGVHTFPAVLQSSGLYSLSSVVTVPSSSLGTKTYTCNVDHKPSNTKV |
| | DKRVESKYGPPCPSCPAPEFLGGPSVFLFPPKPKDTLMISRTPEVTCVVVDV |
| | SQEDPEVQFNWYVDGVEVHNAKTKPREEQFNSTYRVVSVLTVLHQDWLN |
| | GKEYKCKVSNKGLPSSIEKTISKAKGQPREPQVYTLPPSQEEMTKNQVSLTC |
| | LVKGFYPSDIAVEWESNGQPENNYKTTPPVLDSDGSFFLYSRLTVDKSRWQ |
| | EGNVFSCSVMHEALHNHYTQKSLSLSLGKGGGGSGGGGSGGGGSMDGRF |
| | WIRVQESVMVPEGLCISVPCSFSYPRQDWTGSTPAYGYWFKAVTETTKGA |
| | PVATNHQSREVEMSTRGRFQLTGDPAKGNCSLVIRDAQMQDESQYFFRVE |
| | RGSYVRYNFMNDGFFLKVTALTQKPDVYIPETLEPGQPVTVICVFNWAFEE |
| | CPPPSFSWTGAALSSQGTKPTTSHFSVLSFTPRPQDHNTDLTCHVDFSRKGV |
| | SAQRTVRLRVAYAPRDLVISISRDNTPALEPQPQGNVPYLEAQKGQFLRLL |
| | CAADSQPPATLSWVLQNRVLSSSHPWGPRPLGLELPGVKAGDSGRYTCRA |
| | ENRLGSQQRALDLSVQYPPENLRVMVSQANRTVLENLGNGTSLPVLEGQS |
| | LCLVCVTHSSPPARLSWTQRGQVLSPSQPSDPGVLELPRVQVEHEGEFTCH |
| | ARHPLGSQHVSLSLSVHYSPKLLGPSCSWEAEGLHCSCSSQASPAPSLRWW |
| | LGEELLEGNSSQDSFEVTPSSAGPWANSSLSLHGGLSSGLRLRCEAWNVHG |
| | AQSGSILQLPDKKGLIST |
| SEQ ID NO: 583 | EEELQVIQPDKSVLVAAGETATLRCTATSLIPVGPIQWFRGAGPGRELIYNQ |
| SIRPaecd-Fc- | KEGHFPRVTTVSDLTKRNNMDFSIRIGNITPADAGTYYCVKFRKGSPDDVE |
| IL12ecd | FKSGAGTELSVRAKPSASTKGPSVFPLAPCSRSTSESTAALGCLVKDYFPEP |
| | VTVSWNSGALTSGVHTFPAVLQSSGLYSLSSVVTVPSSSLGTKTYTCNVDH |
| | KPSNTKVDKRVESKYGPPCPSCPAPEFLGGPSVFLFPPKPKDTLMISRTPEVT |
| | CVVVDVSQEDPEVQFNWYVDGVEVHNAKTKPREEQFNSTYRVVSVLTVL |
| | HQDWLNGKEYKCKVSNKGLPSSIEKTISKAKGQPREPQVYTLPPSQEEMTK |
| | NQVSLTCLVKGFYPSDIAVEWESNGQPENNYKTTPPVLDSDGSFFLYSRLT |
| | VDKSRWQEGNVFSCSVMHEALHNHYTQKSLSLSLGKGGGGSGGGGSGGG |
| | GSIWELKKDVYVVELDWYPDAPGEMVVLTCDTPEEDGITWTLDQSSEVLG |
| | SGKTLTIQVKEFGDAGQYTCHKGGEVLSHSLLLLHKKEDGIWSTDILKDQK |
| | EPKNKTFLRCEAKNYSGRFTCWWLTTISTDLTFSVKSSRGSSDPQGVTCGA |
| | ATLSAERVRGDNKEYEYSVECQEDSACPAAEESLPIEVMVDAVHKLKYEN |
| | YTSSFFIRDIIKPDPPKNLQLKPLKNSRQVEVSWEYPDTWSTPHSYFSLTFCV |
| | QVQGKSKREKKDRVFTDKTSATVICRKNASISVRAQDRYYSSSWSEWASV |
| | PCSGGGGSGGGGSGGGGSRNLPVATPDPGMFPCLHHSQNLLRAVSNMLQK |
| | ARQTLEFYPCTSEEIDHEDITKDKTSTVEACLPLELTKNESCLNSRETSFITN |
| | GSCLASRKTSFMMALCLSSIYEDLKMYQVEFKTMNAKLLMDPKRQIFLDQ |
| | NMLAVIDELMQALNFNSETVPQKSSLEEPDFYKTKIKLCILLHAFRIRAVTID |
| | RVMSYLNAS |
| SEQ ID NO: 584 | IWELKKDVYVVELDWYPDAPGEMVVLTCDTPEEDGITWTLDQSSEVLGSG |
| IL12ecd-Fc- | KTLTIQVKEFGDAGQYTCHKGGEVLSHSLLLLHKKEDGIWSTDILKDQKEP |
| SIRPaecd | KNKTFLRCEAKNYSGRFTCWWLTTISTDLTFSVKSSRGSSDPQGVTCGAAT |
| | LSAERVRGDNKEYEYSVECQEDSACPAAEESLPIEVMVDAVHKLKYENYT |
| | SSFFIRDIIKPDPPKNLQLKPLKNSRQVEVSWEYPDTWSTPHSYFSLTFCVQV |
| | QGKSKREKKDRVFTDKTSATVICRKNASISVRAQDRYYSSSWSEWASVPCS |
| | GGGGSGGGGSGGGGSRNLPVATPDPGMFPCLHHSQNLLRAVSNMLQKAR |
| | QTLEFYPCTSEEIDHEDITKDKTSTVEACLPLELTKNESCLNSRETSFITNGSC |
| | LASRKTSFMMALCLSSIYEDLKMYQVEFKTMNAKLLMDPKRQIFLDQNML |
| | AVIDELMQALNFNSETVPQKSSLEEPDFYKTKIKLCILLHAFRIRAVTIDRV |
| | MSYLNASASTKGPSVFPLAPCSRSTSESTAALGCLVKDYFPEPVTVSWNSG |
| | ALTSGVHTFPAVLQSSGLYSLSSVVTVPSSSLGTKTYTCNVDHKPSNTKVD |
| | KRVESKYGPPCPSCPAPEFLGGPSVFLFPPKPKDTLMISRTPEVTCVVVDVS |
| | QEDPEVQFNWYVDGVEVHNAKTKPREEQFNSTYRVVSVLTVLHQDWLNG |
| | KEYKCKVSNKGLPSSIEKTISKAKGQPREPQVYTLPPSQEEMTKNQVSLTCL |
| | VKGFYPSDIAVEWESNGQPENNYKTTPPVLDSDGSFFLYSRLTVDKSRWQE |
| | GNVFSCSVMHEALHNHYTQKSLSLSLGKGGGGSGGGGSGGGGSEEELQVI |
| | QPDKSVLVAAGETATLRCTATSLIPVGPIQWFRGAGPGRELIYNQKEGHFPR |
| | VTTVSDLTKRNNMDFSIRIGNITPADAGTYYCVKFRKGSPDDVEFKSGAGT |
| | ELSVRAKPS |
| SEQ ID NO: 585 | EEELQVIQPDKSVLVAAGETATLRCTATSLIPVGPIQWFRGAGPGRELIYNQ |
| SIRPaecd-Fc- | KEGHFPRVTTVSDLTKRNNMDFSIRIGNITPADAGTYYCVKFRKGSPDDVE |
| IL15ecd | FKSGAGTELSVRAKPSASTKGPSVFPLAPCSRSTSESTAALGCLVKDYFPEP |
| | VTVSWNSGALTSGVHTFPAVLQSSGLYSLSSVVTVPSSSLGTKTYTCNVDH |
| | KPSNTKVDKRVESKYGPPCPSCPAPEFLGGPSVFLFPPKPKDTLMISRTPEVT |
| | CVVVDVSQEDPEVQFNWYVDGVEVHNAKTKPREEQFNSTYRVVSVLTVL |
| | HQDWLNGKEYKCKVSNKGLPSSIEKTISKAKGQPREPQVYTLPPSQEEMTK |
| | NQVSLTCLVKGFYPSDIAVEWESNGQPENNYKTTPPVLDSDGSFFLYSRLT |
| | VDKSRWQEGNVFSCSVMHEALHNHYTQKSLSLSLGKGGGGSGGGGSGGG |
| | GSNWVNVISDLKKIEDLIQSMHIDATLYTESDVHPSCKVTAMKCFLLELQVI |
| | SLESGDASIHDTVENLIILANNSLSSNGNVTESGCKECEELEEKNIKEFLQSF |
| | VHIVQMFINTS |
| SEQ ID NO: 586 | NWVNVISDLKKIEDLIQSMHIDATLYTESDVHPSCKVTAMKCFLLELQVISL |
| IL15ecd-Fc- | ESGDASIHDTVENLIILANNSLSSNGNVTESGCKECEELEEKNIKEFLQSFVH |
| SIRPaecd | IVQMFINTSASTKGPSVFPLAPCSRSTSESTAALGCLVKDYFPEPVTVSWNS |
| | GALTSGVHTFPAVLQSSGLYSLSSVVTVPSSSLGTKTYTCNVDHKPSNTKV |
| | DKRVESKYGPPCPSCPAPEFLGGPSVFLFPPKPKDTLMISRTPEVTCVVVDV |
| | SQEDPEVQFNWYVDGVEVHNAKTKPREEQFNSTYRVVSVLTVLHQDWLN |
| | GKEYKCKVSNKGLPSSIEKTISKAKGQPREPQVYTLPPSQEEMTKNQVSLTC |
| | LVKGFYPSDIAVEWESNGQPENNYKTTPPVLDSDGSFFLYSRLTVDKSRWQ |
| | EGNVFSCSVMHEALHNHYTQKSLSLSLGKGGGGSGGGGSGGGGSEEELQV |
| | IQPDKSVLVAAGETATLRCTATSLIPVGPIQWFRGAGPGRELIYNQKEGHFP |
| | RVTTVSDLTKRNNMDFSIRIGNITPADAGTYYCVKFRKGSPDDVEFKSGAG |
| | TELSVRAKPS |
| SEQ ID NO: 587 | TIPPHVQKSVNNDMIVTDNNGAVKFPQLCKFCDVRFSTCDNQKSCMSNCSI |
| TGFbRecd-Fc- | TSICEKPQEVCVAVWRKNDENITLETVCHDPKLPYHDFILEDAASPKCIMKE |
| IL12ecd | KKKPGETFFMCSCSSDECNDNIIFSEEYNTSNPDASTKGPSVFPLAPCSRSTS |
| | ESTAALGCLVKDYFPEPVTVSWNSGALTSGVHTFPAVLQSSGLYSLSSVVT |
| | VPSSSLGTKTYTCNVDHKPSNTKVDKRVESKYGPPCPSCPAPEFLGGPSVFL |
| | FPPKPKDTLMISRTPEVTCVVVDVSQEDPEVQFNWYVDGVEVHNAKTKPR |
| | EEQFNSTYRVVSVLTVLHQDWLNGKEYKCKVSNKGLPSSIEKTISKAKGQP |
| | REPQVYTLPPSQEEMTKNQVSLTCLVKGFYPSDIAVEWESNGQPENNYKTT |
| | PPVLDSDGSFFLYSRLTVDKSRWQEGNVFSCSVMHEALHNHYTQKSLSLSL |
| | GKGGGGSGGGGSGGGGSIWELKKDVYVVELDWYPDAPGEMVVLTCDTPE |
| | EDGITWTLDQSSEVLGSGKTLTIQVKEFGDAGQYTCHKGGEVLSHSLLLLH |
| | KKEDGIWSTDILKDQKEPKNKIFLRCEAKNYSGRFTCWWLTTISTDLTFSV |
| | KSSRGSSDPQGVTCGAATLSAERVRGDNKEYEYSVECQEDSACPAAEESLP |
| | IEVMVDAVHKLKYENYTSSFFIRDIIKPDPPKNLQLKPLKNSRQVEVSWEYP |
| | DTWSTPHSYFSLTFCVQVQGKSKREKKDRVFTDKTSATVICRKNASISVRA |
| | QDRYYSSSWSEWASVPCSGGGGSGGGGSGGGGSRNLPVATPDPGMFPCLH |
| | HSQNLLRAVSNMLQKARQTLEFYPCTSEEIDHEDITKDKTSTVEACLPLELT |
| | KNESCLNSRETSFITNGSCLASRKTSFMMALCLSSIYEDLKMYQVEFKTMN |
| | AKLLMDPKRQIFLDQNMLAVIDELMQALNFNSETVPQKSSLEEPDFYKTKI |
| | KLCILLHAFRIRAVTIDRVMSYLNAS |
| SEQ ID NO: 588 | IWELKKDVYVVELDWYPDAPGEMVVLTCDTPEEDGITWTLDQSSEVLGSG |
| IL12ecd-Fc- | KTLTIQVKEFGDAGQYTCHKGGEVLSHSLLLLHKKEDGIWSTDILKDQKEP |
| TGFbRecd | KNKTFLRCEAKNYSGRFTCWWLTTISTDLTFSVKSSRGSSDPQGVTCGAAT |
| | LSAERVRGDNKEYEYSVECQEDSACPAAEESLPIEVMVDAVHKLKYENYT |
| | SSFFIRDIIKPDPPKNLQLKPLKNSRQVEVSWEYPDTWSTPHSYFSLTFCVQV |
| | QGKSKREKKDRVFTDKTSATVICRKNASISVRAQDRYYSSSWSEWASVPCS |
| | GGGGSGGGGSGGGGSRNLPVATPDPGMFPCLHHSQNLLRAVSNMLQKAR |
| | QTLEFYPCTSEEIDHEDITKDKTSTVEACLPLELTKNESCLNSRETSFITNGSC |
| | LASRKTSFMMALCLSSIYEDLKMYQVEFKTMNAKLLMDPKRQIFLDQNML |
| | AVIDELMQALNFNSETVPQKSSLEEPDFYKTKIKLCILLHAFRIRAVTIDRV |
| | MSYLNASASTKGPSVFPLAPCSRSTSESTAALGCLVKDYFPEPVTVSWNSG |
| | ALTSGVHTFPAVLQSSGLYSLSSVVTVPSSSLGTKTYTCNVDHKPSNTKVD |
| | KRVESKYGPPCPSCPAPEFLGGPSVFLFPPKPKDTLMISRTPEVTCVVVDVS |
| | QEDPEVQFNWYVDGVEVHNAKTKPREEQFNSTYRVVSVLTVLHQDWLNG |
| | KEYKCKVSNKGLPSSIEKTISKAKGQPREPQVYTLPPSQEEMTKNQVSLTCL |
| | VKGFYPSDIAVEWESNGQPENNYKTTPPVLDSDGSFFLYSRLTVDKSRWQE |
| | GNVFSCSVMHEALHNHYTQKSLSLSLGKGGGGSGGGGSGGGGSTIPPHVQ |
| | KSVNNDMIVTDNNGAVKFPQLCKFCDVRFSTCDNQKSCMSNCSITSICEKP |
| | QEVCVAVWRKNDENITLETVCHDPKLPYHDFILEDAASPKCIMKEKKKPGE |
| | TFFMCSCSSDECNDNIIFSEEYNTSNPD |
| SEQ ID NO: 589 | TIPPHVQKSVNNDMIVTDNNGAVKFPQLCKFCDVRFSTCDNQKSCMSNCSI |
| TGFbRecd-Fc- | TSICEKPQEVCVAVWRKNDENITLETVCHDPKLPYHDFILEDAASPKCIMKE |
| IL15ecd | KKKPGETFFMCSCSSDECNDNIIFSEEYNTSNPDASTKGPSVFPLAPCSRSTS |
| | ESTAALGCLVKDYFPEPVTVSWNSGALTSGVHTFPAVLQSSGLYSLSSVVT |
| | VPSSSLGTKTYTCNVDHKPSNTKVDKRVESKYGPPCPSCPAPEFLGGPSVFL |
| | FPPKPKDTLMISRTPEVTCVVVDVSQEDPEVQFNWYVDGVEVHNAKTKPR |
| | EEQFNSTYRVVSVLTVLHQDWLNGKEYKCKVSNKGLPSSIEKTISKAKGQP |
| | REPQVYTLPPSQEEMTKNQVSLTCLVKGFYPSDIAVEWESNGQPENNYKTT |
| | PPVLDSDGSFFLYSRLTVDKSRWQEGNVFSCSVMHEALHNHYTQKSLSLSL |
| | GKGGGGSGGGGSGGGGSNWVNVISDLKKIEDLIQSMHIDATLYTESDVHPS |
| | CKVTAMKCFLLELQVISLESGDASIHDTVENLIILANNSLSSNGNVTESGCK |
| | ECEELEEKNIKEFLQSFVHIVQMFINTS |
| SEQ ID NO: 590 | NWVNVISDLKKIEDLIQSMHIDATLYTESDVHPSCKVTAMKCFLLELQVISL |
| IL15ecd-Fc- | ESGDASIHDTVENLIILANNSLSSNGNVTESGCKECEELEEKNIKEFLQSFVH |
| TGFbRecd | IVQMFINTSASTKGPSVFPLAPCSRSTSESTAALGCLVKDYFPEPVTVSWNS |
| | GALTSGVHTFPAVLQSSGLYSLSSVVTVPSSSLGTKTYTCNVDHKPSNTKV |
| | DKRVESKYGPPCPSCPAPEFLGGPSVFLFPPKPKDTLMISRTPEVTCVVVDV |
| | SQEDPEVQFNWYVDGVEVHNAKTKPREEQFNSTYRVVSVLTVLHQDWLN |
| | GKEYKCKVSNKGLPSSIEKTISKAKGQPREPQVYTLPPSQEEMTKNQVSLTC |
| | LVKGFYPSDIAVEWESNGQPENNYKTTPPVLDSDGSFFLYSRLTVDKSRWQ |
| | EGNVFSCSVMHEALHNHYTQKSLSLSLGKGGGGSGGGGSGGGGSTIPPHV |
| | QKSVNNDMIVTDNNGAVKFPQLCKFCDVRFSTCDNQKSCMSNCSITSICEK |
| | PQEVCVAVWRKNDENITLETVCHDPKLPYHDFILEDAASPKCIMKEKKKPG |
| | ETFFMCSCSSDECNDNIIFSEEYNTSNPD |
| SEQ ID NO: 591 | SEVEYRAEVGQNAYLPCFYTPAAPGNLVPVCWGKGACPVFECGNVVLRT |
| TIM3ecd-Fc- | DERDVNYWTSRYWLNGDFRKGDVSLTIENVTLADSGIYCCRIQIPGIMNDE |
| IL12ecd | KFNLKLVIKPAKVTPAPTRQRDFTAAFPRMLTTRGHGPAETQTLGSLPDINL |
| | TQISTLANELRDSRLANDLRDSGATIRIGASTKGPSVFPLAPCSRSTSESTAA |
| | LGCLVKDYFPEPVTVSWNSGALTSGVHTFPAVLQSSGLYSLSSVVTVPSSSL |
| | GTKTYTCNVDHKPSNTKVDKRVESKYGPPCPSCPAPEFLGGPSVFLFPPKPK |
| | DTLMISRTPEVTCVVVDVSQEDPEVQFNWYVDGVEVHNAKTKPREEQFNS |
| | TYRVVSVLTVLHQDWLNGKEYKCKVSNKGLPSSIEKTISKAKGQPREPQV |
| | YTLPPSQEEMTKNQVSLTCLVKGFYPSDIAVEWESNGQPENNYKTTPPVLD |
| | SDGSFFLYSRLTVDKSRWQEGNVFSCSVMHEALHNHYTQKSLSLSLGKGG |
| | GGSGGGGSGGGGSIWELKKDVYVVELDWYPDAPGEMVVLTCDTPEEDGI |
| | TWTLDQSSEVLGSGKTLTIQVKEFGDAGQYTCHKGGEVLSHSLLLLHKKE |
| | DGIWSTDILKDQKEPKNKTFLRCEAKNYSGRFTCWWLTTISTDLTFSVKSS |
| | RGSSDPQGVTCGAATLSAERVRGDNKEYEYSVECQEDSACPAAEESLPIEV |
| | MVDAVHKLKYENYTSSFFIRDIIKPDPPKNLQLKPLKNSRQVEVSWEYPDT |
| | WSTPHSYFSLTFCVQVQGKSKREKKDRVFTDKTSATVICRKNASISVRAQD |
| | RYYSSSWSEWASVPCSGGGGSGGGGSGGGGSRNLPVATPDPGMFPCLHHS |
| | QNLLRAVSNMLQKARQTLEFYPCTSEEIDHEDITKDKTSTVEACLPLELTKN |
| | ESCLNSRETSFITNGSCLASRKTSFMMALCLSSIYEDLKMYQVEFKTMNAK |
| | LLMDPKRQIFLDQNMLAVIDELMQALNFNSETVPQKSSLEEPDFYKTKIKL |
| | CILLHAFRIRAVTIDRVMSYLNAS |
| SEQ ID NO: 592 | IWELKKDVYVVELDWYPDAPGEMVVLTCDTPEEDGITWTLDQSSEVLGSG |
| IL12ecd-Fc- | KTLTIQVKEFGDAGQYTCHKGGEVLSHSLLLLHKKEDGIWSTDILKDQKEP |
| TIM3ecd | KNKTFLRCEAKNYSGRFTCWWLTTISTDLTFSVKSSRGSSDPQGVTCGAAT |
| | LSAERVRGDNKEYEYSVECQEDSACPAAEESLPIEVMVDAVHKLKYENYT |
| | SSFFIRDIIKPDPPKNLQLKPLKNSRQVEVSWEYPDTWSTPHSYFSLTFCVQV |
| | QGKSKREKKDRVFTDKTSATVICRKNASISVRAQDRYYSSSWSEWASVPCS |
| | GGGGSGGGGSGGGGSRNLPVATPDPGMFPCLHHSQNLLRAVSNMLQKAR |
| | QTLEFYPCTSEEIDHEDITKDKTSTVEACLPLELTKNESCLNSRETSFITNGSC |
| | LASRKTSFMMALCLSSIYEDLKMYQVEFKTMNAKLLMDPKRQIFLDQNML |
| | AVIDELMQALNFNSETVPQKSSLEEPDFYKTKIKLCILLHAFRIRAVTIDRV |
| | MSYLNASASTKGPSVFPLAPCSRSTSESTAALGCLVKDYFPEPVTVSWNSG |
| | ALTSGVHTFPAVLQSSGLYSLSSVVTVPSSSLGTKTYTCNVDHKPSNTKVD |
| | KRVESKYGPPCPSCPAPEFLGGPSVFLFPPKPKDTLMISRTPEVTCVVVDVS |
| | QEDPEVQFNWYVDGVEVHNAKTKPREEQFNSTYRVVSVLTVLHQDWLNG |
| | KEYKCKVSNKGLPSSIEKTISKAKGQPREPQVYTLPPSQEEMTKNQVSLTCL |
| | VKGFYPSDIAVEWESNGQPENNYKTTPPVLDSDGSFFLYSRLTVDKSRWQE |
| | GNVFSCSVMHEALHNHYTQKSLSLSLGKGGGGSGGGGSGGGGSSEVEYRA |
| | EVGQNAYLPCFYTPAAPGNLVPVCWGKGACPVFECGNVVLRTDERDVNY |
| | WTSRYWLNGDFRKGDVSLTIENVTLADSGIYCCRIQIPGIMNDEKFNLKLVI |
| | KPAKVTPAPTRQRDFTAAFPRMLTTRGHGPAETQTLGSLPDINLTQISTLAN |
| | ELRDSRLANDLRDSGATIRIG |
| SEQ ID NO: 593 | SEVEYRAEVGQNAYLPCFYTPAAPGNLVPVCWGKGACPVFECGNVVLRT |
| TIM3ecd-Fc- | DERDVNYWTSRYWLNGDFRKGDVSLTIENVTLADSGIYCCRIQIPGIMNDE |
| IL15ecd | KFNLKLVIKPAKVTPAPTRQRDFTAAFPRMLTTRGHGPAETQTLGSLPDINL |
| | TQISTLANELRDSRLANDLRDSGATIRIGASTKGPSVFPLAPCSRSTSESTAA |
| | LGCLVKDYFPEPVTVSWNSGALTSGVHTFPAVLQSSGLYSLSSVVTVPSSSL |
| | GTKTYTCNVDHKPSNTKVDKRVESKYGPPCPSCPAPEFLGGPSVFLFPPKPK |
| | DTLMISRTPEVTCVVVDVSQEDPEVQFNWYVDGVEVHNAKTKPREEQFNS |
| | TYRVVSVLTVLHQDWLNGKEYKCKVSNKGLPSSIEKTISKAKGQPREPQV |
| | YTLPPSQEEMTKNQVSLTCLVKGFYPSDIAVEWESNGQPENNYKTTPPVLD |
| | SDGSFFLYSRLTVDKSRWQEGNVFSCSVMHEALHNHYTQKSLSLSLGKGG |
| | GGSGGGGSGGGGSNWVNVISDLKKIEDLIQSMHIDATLYTESDVHPSCKVT |
| | AMKCFLLELQVISLESGDASIHDTVENLIILANNSLSSNGNVTESGCKECEEL |
| | EEKNIKEFLQSFVHIVQMFINTS |
| SEQ ID NO: 594 | NWVNVISDLKKIEDLIQSMHIDATLYTESDVHPSCKVTAMKCFLLELQVISL |
| IL15ecd-Fc- | ESGDASIHDTVENLIILANNSLSSNGNVTESGCKECEELEEKNIKEFLQSFVH |
| TIM3ecd | IVQMFINTSASTKGPSVFPLAPCSRSTSESTAALGCLVKDYFPEPVTVSWNS |
| | GALTSGVHTFPAVLQSSGLYSLSSVVTVPSSSLGTKTYTCNVDHKPSNTKV |
| | DKRVESKYGPPCPSCPAPEFLGGPSVFLFPPKPKDTLMISRTPEVTCVVVDV |
| | SQEDPEVQFNWYVDGVEVHNAKTKPREEQFNSTYRVVSVLTVLHQDWLN |
| | GKEYKCKVSNKGLPSSIEKTISKAKGQPREPQVYTLPPSQEEMTKNQVSLTC |
| | LVKGFYPSDIAVEWESNGQPENNYKTTPPVLDSDGSFFLYSRLTVDKSRWQ |
| | EGNVFSCSVMHEALHNHYTQKSLSLSLGKGGGGSGGGGSGGGGSSEVEYR |
| | AEVGQNAYLPCFYTPAAPGNLVPVCWGKGACPVFECGNVVLRTDERDVN |
| | YWTSRYWLNGDFRKGDVSLTIENVTLADSGIYCCRIQIPGIMNDEKFNLKL |
| | VIKPAKVTPAPTRQRDFTAAFPRMLTTRGHGPAETQTLGSLPDINLTQISTL |
| | ANELRDSRLANDLRDSGATIRIG |
| SEQ ID NO: 595 | SDTGRPFVEMYSEIPEIIHMTEGRELVIPCRVTSPNITVTLKKFPLDTLIPDGK |
| VEGFRecd-Fc- | RIIWDSRKGFIISNATYKEIGLLTCEATVNGHLYKTNYLTHRQTNTIIDVVLS |
| IL12ecd | PSHGIELSVGEKLVLNCTARTELNVGIDFNWEYPSSKHQHKKLVNRDLKTQ |
| | SGSEMKKFLSTLTIDGVTRSDQGLYTCAASSGLMTKKNSTFVRVHEKASTK |
| | GPSVFPLAPCSRSTSESTAALGCLVKDYFPEPVTVSWNSGALTSGVHIFPAV |
| | LQSSGLYSLSSVVTVPSSSLGTKTYTCNVDHKPSNTKVDKRVESKYGPPCPS |
| | CPAPEFLGGPSVFLFPPKPKDTLMISRTPEVTCVVVDVSQEDPEVQFNWYV |
| | DGVEVHNAKTKPREEQFNSTYRVVSVLTVLHQDWLNGKEYKCKVSNKGL |
| | PSSIEKTISKAKGQPREPQVYTLPPSQEEMTKNQVSLTCLVKGFYPSDIAVE |
| | WESNGQPENNYKTTPPVLDSDGSFFLYSRLTVDKSRWQEGNVFSCSVMHE |
| | ALHNHYTQKSLSLSLGKGGGGSGGGGSGGGGSIWELKKDVYVVELDWYP |
| | DAPGEMVVLTCDTPEEDGITWTLDQSSEVLGSGKTLTIQVKEFGDAGQYTC |
| | HKGGEVLSHSLLLLHKKEDGIWSTDILKDQKEPKNKTFLRCEAKNYSGRFT |
| | CWWLTTISTDLTFSVKSSRGSSDPQGVTCGAATLSAERVRGDNKEYEYSVE |
| | CQEDSACPAAEESLPIEVMVDAVHKLKYENYTSSFFIRDIIKPDPPKNLQLKP |
| | LKNSRQVEVSWEYPDTWSTPHSYFSLTFCVQVQGKSKREKKDRVFTDKTS |
| | ATVICRKNASISVRAQDRYYSSSWSEWASVPCSGGGGSGGGGSGGGGSRN |
| | LPVATPDPGMFPCLHHSQNLLRAVSNMLQKARQTLEFYPCTSEEIDHEDIT |
| | KDKTSTVEACLPLELTKNESCLNSRETSFITNGSCLASRKTSFMMALCLSSIY |
| | EDLKMYQVEFKTMNAKLLMDPKRQIFLDQNMLAVIDELMQALNFNSETV |
| | PQKSSLEEPDFYKTKIKLCILLHAFRIRAVTIDRVMSYLNAS |
| SEQ ID NO: 596 | IWELKKDVYVVELDWYPDAPGEMVVLTCDTPEEDGITWTLDQSSEVLGSG |
| IL12ecd-Fc- | KTLTIQVKEFGDAGQYTCHKGGEVLSHSLLLLHKKEDGIWSTDILKDQKEP |
| VEGFRecd | KNKTFLRCEAKNYSGRFTCWWLTTISTDLTFSVKSSRGSSDPQGVTCGAAT |
| | LSAERVRGDNKEYEYSVECQEDSACPAAEESLPIEVMVDAVHKLKYENYT |
| | SSFFIRDIIKPDPPKNLQLKPLKNSRQVEVSWEYPDTWSTPHSYFSLTFCVQV |
| | QGKSKREKKDRVFTDKTSATVICRKNASISVRAQDRYYSSSWSEWASVPCS |
| | GGGGSGGGGSGGGGSRNLPVATPDPGMFPCLHHSQNLLRAVSNMLQKAR |
| | QTLEFYPCTSEEIDHEDITKDKTSTVEACLPLELTKNESCLNSRETSFITNGSC |
| | LASRKTSFMNIALCLSSIYEDLKMYQVEFKTMNAKLLMDPKRQIFLDQNML |
| | AVIDELMQALNFNSETVPQKSSLEEPDFYKTKIKLCILLHAFRIRAVTIDRV |
| | MSYLNASASTKGPSVFPLAPCSRSTSESTAALGCLVKDYFPEPVTVSWNSG |
| | ALTSGVHTFPAVLQSSGLYSLSSVVTVPSSSLGTKTYTCNVDHKPSNTKVD |
| | KRVESKYGPPCPSCPAPEFLGGPSVFLFPPKPKDTLMISRTPEVTCVVVDVS |
| | QEDPEVQFNWYVDGVEVHNAKTKPREEQFNSTYRVVSVLTVLHQDWLNG |
| | KEYKCKVSNKGLPSSIEKTISKAKGQPREPQVYTLPPSQEEMTKNQVSLTCL |
| | VKGFYPSDIAVEWESNGQPENNYKTTPPVLDSDGSFFLYSRLTVDKSRWQE |
| | GNVFSCSVMHEALHNHYTQKSLSLSLGKGGGGSGGGGSGGGGSSDTGRPF |
| | VEMYSEIPEIIHMTEGRELVIPCRVTSPNITVTLKKFPLDTLIPDGKRIIWDSR |
| | KGFIISNATYKEIGLLTCEATVNGHLYKTNYLTHRQTNTIIDVVLSPSHGIEL |
| | SVGEKLVLNCTARTELNVGIDFNWEYPSSKHQHKKLVNRDLKTQSGSEMK |
| | KFLSTLTIDGVTRSDQGLYTCAASSGLMTKKNSTFVRVHEK |
| SEQ ID NO: 597 | SDTGRPFVEMYSEIPEIIHMTEGRELVIPCRVTSPNITVTLKKFPLDTLIPDGK |
| VEGFRecd-Fc- | RIIWDSRKGFIISNATYKEIGLLTCEATVNGHLYKTNYLTHRQTNTIIDVVLS |
| IL15ecd | PSHGIELSVGEKLVLNCTARTELNVGIDFNWEYPSSKHQHKKLVNRDLKTQ |
| | SGSEMKKFLSTLTIDGVTRSDQGLYTCAASSGLMTKKNSTFVRVHEKASTK |
| | GPSVFPLAPCSRSTSESTAALGCLVKDYFPEPVTVSWNSGALTSGVHTFPAV |
| | LQSSGLYSLSSVVTVPSSSLGTKTYTCNVDHKPSNTKVDKRVESKYGPPCPS |
| | CPAPEFLGGPSVFLFPPKPKDTLMISRTPEVTCVVVDVSQEDPEVQFNWYV |
| | DGVEVHNAKTKPREEQFNSTYRVVSVLTVLHQDWLNGKEYKCKVSNKGL |
| | PSSIEKTISKAKGQPREPQVYTLPPSQEEMTKNQVSLTCLVKGFYPSDIAVE |
| | WESNGQPENNYKTTPPVLDSDGSFFLYSRLTVDKSRWQEGNVFSCSVMHE |
| | ALHNHYTQKSLSLSLGKGGGGSGGGGSGGGGSNWVNVISDLKKIEDLIQS |
| | MHIDATLYTESDVHPSCKVTAMKCFLLELQVISLESGDASIHDTVENLIILA |
| | NNSLSSNGNVTESGCKECEELEEKNIKEFLQSFVHIVQMFINTS |
| SEQ ID NO: 598 | NWVNVISDLKKIEDLIQSMHIDATLYTESDVHPSCKVTAMKCFLLELQVISL |
| IL15ecd-Fc- | ESGDASIHDTVENLIILANNSLSSNGNVTESGCKECEELEEKNIKEFLQSFVH |
| VEGFRecd | IVQMFINTSASTKGPSVFPLAPCSRSTSESTAALGCLVKDYFPEPVTVSWNS |
| | GALTSGVHTFPAVLQSSGLYSLSSVVTVPSSSLGTKTYTCNVDHKPSNTKV |
| | DKRVESKYGPPCPSCPAPEFLGGPSVFLFPPKPKDTLMISRTPEVTCVVVDV |
| | SQEDPEVQFNWYVDGVEVHNAKTKPREEQFNSTYRVVSVLTVLHQDWLN |
| | GKEYKCKVSNKGLPSSIEKTISKAKGQPREPQVYTLPPSQEEMTKNQVSLTC |
| | LVKGFYPSDIAVEWESNGQPENNYKTTPPVLDSDGSFFLYSRLTVDKSRWQ |
| | EGNVFSCSVMHEALHNHYTQKSLSLSLGKGGGGSGGGGSGGGGSSDTGRP |
| | FVEMYSEIPEIIHMTEGRELVIPCRVTSPNITVTLKKFPLDTLIPDGKRIIWDS |
| | RKGFIISNATYKEIGLLTCEATVNGHLYKTNYLTHRQTNTIIDVVLSPSHGIE |
| | LSVGEKLVLNCTARTELNVGIDFNWEYPSSKHQHKKLVNRDLKTQSGSEM |
| | KKFLSTLTIDGVTRSDQGLYTCAASSGLMTKKNSTFVRVHEK |
| SEQ ID NO: 599 | MDGRFWIRVQESVMVPEGLCISVPCSFSYPRQDWTGSTPAYGYWFKAVTE |
| SIGLEC10ecd- | TTKGAPVATNHQSREVEMSTRGRFQLTGDPAKGNCSLVIRDAQMQDESQY |
| Fc-41BBLecd | FFRVERGSYVRYNFMNDGFFLKVTALTQKPDVYIPETLEPGQPVTVICVFN |
| | WAFEECPPPSFSWTGAALSSQGTKPTTSHFSVLSFTPRPQDHNTDLTCHVDF |
| | SRKGVSAQRTVRLRVAYAPRDLVISISRDNTPALEPQPQGNVPYLEAQKGQ |
| | FLRLLCAADSQPPATLSWVLQNRVLSSSHPWGPRPLGLELPGVKAGDSGRY |
| | TCRAENRLGSQQRALDLSVQYPPENLRVMVSQANRTVLENLGNGTSLPVL |
| | EGQSLCLVCVTHSSPPARLSWTQRGQVLSPSQPSDPGVLELPRVQVEHEGE |
| | FTCHARHPLGSQHVSLSLSVHYSPKLLGPSCSWEAEGLHCSCSSQASPAPSL |
| | RWWLGEELLEGNSSQDSFEVTPSSAGPWANSSLSLHGGLSSGLRLRCEAW |
| | NVHGAQSGSILQLPDKKGLISTASTKGPSVFPLAPCSRSTSESTAALGCLVK |
| | DYFPEPVTVSWNSGALTSGVHTFPAVLQSSGLYSLSSVVTVPSSSLGTKTYT |
| | CNVDHKPSNTKVDKRVESKYGPPCPSCPAPEFLGGPSVFLFPPKPKDTLMIS |
| | RTPEVTCVVVDVSQEDPEVQFNWYVDGVEVHNAKTKPREEQFNSTYRVV |
| | SVLTVLHQDWLNGKEYKCKVSNKGLPSSIEKTISKAKGQPREPQVYTLPPS |
| | QEEMTKNQVSLTCLVKGFYPSDIAVEWESNGQPENNYKTTPPVLDSDGSFF |
| | LYSRLTVDKSRWQEGNVFSCSVMHEALHNHYTQKSLSLSLGKGGGGSGG |
| | GGSGGGGSACPWAVSGARASPGSAASPRLREGPELSPDDPAGLLDLRQGM |
| | FAQLVAQNVLLIDGPLSWYSDPGLAGVSLTGGLSYKEDTKELVVAKAGVY |
| | YVFFQLELRRVVAGEGSGSVSLALHLQPLRSAAGAAALALTVDLPPASSEA |
| | RNSAFGFQGRLLHLSAGQRLGVHLHTEARARHAWQLTQGATVLGLFRVTP |
| | EIPAGLPSPRSE |
| SEQ ID NO: 600 | ACPWAVSGARASPGSAASPRLREGPELSPDDPAGLLDLRQGMFAQLVAQN |
| 41BBLecd-Fc- | VLLIDGPLSWYSDPGLAGVSLTGGLSYKEDTKELVVAKAGVYYVFFQLEL |
| SIGLEC10ecd | RRVVAGEGSGSVSLALHLQPLRSAAGAAALALTVDLPPASSEARNSAFGFQ |
| | GRLLHLSAGQRLGVHLHTEARARHAWQLTQGATVLGLFRVTPEIPAGLPSP |
| | RSEASTKGPSVFPLAPCSRSTSESTAALGCLVKDYFPEPVTVSWNSGALTSG |
| | VHTFPAVLQSSGLYSLSSVVTVPSSSLGTKTYTCNVDHKPSNTKVDKRVES |
| | KYGPPCPSCPAPEFLGGPSVFLFPPKPKDTLMISRTPEVTCVVVDVSQEDPE |
| | VQFNWYVDGVEVHNAKTKPREEQFNSTYRVVSVLTVLHQDWLNGKEYK |
| | CKVSNKGLPSSIEKTISKAKGQPREPQVYTLPPSQEEMTKNQVSLTCLVKGF |
| | YPSDIAVEWESNGQPENNYKTTPPVLDSDGSFFLYSRLTVDKSRWQEGNVF |
| | SCSVMHEALHNHYTQKSLSLSLGKGGGGSGGGGSGGGGSMDGRFWIRVQ |
| | ESVMVPEGLCISVPCSFSYPRQDWTGSTPAYGYWFKAVTETTKGAPVATN |
| | HQSREVEMSTRGRFQLTGDPAKGNCSLVIRDAQMQDESQYFFRVERGSYV |
| | RYNFMNDGFFLKVTALTQKPDVYIPETLEPGQPVTVICVFNWAFEECPPPSF |
| | SWTGAALSSQGTKPTTSHFSVLSFTPRPQDHNTDLTCHVDFSRKGVSAQRT |
| | VRLRVAYAPRDLVISISRDNTPALEPQPQGNVPYLEAQKGQFLRLLCAADS |
| | QPPATLSWVLQNRVLSSSHPWGPRPLGLELPGVKAGDSGRYTCRAENRLG |
| | SQQRALDLSVQYPPENLRVMVSQANRTVLENLGNGTSLPVLEGQSLCLVC |
| | VTHSSPPARLSWTQRGQVLSPSQPSDPGVLELPRVQVEHEGEFTCHARHPL |
| | GSQHVSLSLSVHYSPKLLGPSCSWEAEGLHCSCSSQASPAPSLRWWLGEEL |
| | LEGNSSQDSFEVTPSSAGPWANSSLSLHGGLSSGLRLRCEAWNVHGAQSGS |
| | ILQLPDKKGLIST |
| SEQ ID NO: 601 | MDGRFWIRVQESVMVPEGLCISVPCSFSYPRQDWTGSTPAYGYWFKAVTE |
| SIGLEC10ecd- | TTKGAPVATNHQSREVEMSTRGRFQLTGDPAKGNCSLVIRDAQMQDESQY |
| Fc-CD30Lecd | FFRVERGSYVRYNFMNDGFFLKVTALTQKPDVYIPETLEPGQPVTVICVFN |
| | WAFEECPPPSFSWTGAALSSQGTKPTTSHFSVLSFTPRPQDHNTDLTCHVDF |
| | SRKGVSAQRTVRLRVAYAPRDLVISISRDNTPALEPQPQGNVPYLEAQKGQ |
| | FLRLLCAADSQPPATLSWVLQNRVLSSSHPWGPRPLGLELPGVKAGDSGRY |
| | TCRAENRLGSQQRALDLSVQYPPENLRVMVSQANRTVLENLGNGTSLPVL |
| | EGQSLCLVCVTHSSPPARLSWTQRGQVLSPSQPSDPGVLELPRVQVEHEGE |
| | FTCHARHPLGSQHVSLSLSVHYSPKLLGPSCSWEAEGLHCSCSSQASPAPSL |
| | RWWLGEELLEGNSSQDSFEVTPSSAGPWANSSLSLHGGLSSGLRLRCEAW |
| | NVHGAQSGSILQLPDKKGLISTASTKGPSVFPLAPCSRSTSESTAALGCLVK |
| | DYFPEPVTVSWNSGALTSGVHTFPAVLQSSGLYSLSSVVTVPSSSLGTKTYT |
| | CNVDHKPSNTKVDKRVESKYGPPCPSCPAPEFLGGPSVFLFPPKPKDTLMIS |
| | RTPEVTCVVVDVSQEDPEVQFNWYVDGVEVHNAKTKPREEQFNSTYRVV |
| | SVLTVLHQDWLNGKEYKCKVSNKGLPSSIEKTISKAKGQPREPQVYTLPPS |
| | QEEMTKNQVSLTCLVKGFYPSDIAVEWESNGQPENNYKTTPPVLDSDGSFF |
| | LYSRLTVDKSRWQEGNVFSCSVMHEALHNHYTQKSLSLSLGKGGGGSGG |
| | GGSGGGGSQRTDSIPNSPDNVPLKGGNCSEDLLCILKRAPFKKSWAYLQVA |
| | KHLNKTKLSWNKDGILHGVRYQDGNLVIQFPGLYFIICQLQFLVQCPNNSV |
| | DLKLELLINKHIKKQALVTVCESGMQTKHVYQNLSQFLLDYLQVNTTISVN |
| | VDTFQYIDTSTFPLENVLSIFLYSNSD |
| SEQ ID NO: 602 | QRTDSIPNSPDNVPLKGGNCSEDLLCILKRAPFKKSWAYLQVAKHLNKTKL |
| CD30Lecd-Fc- | SWNKDGILHGVRYQDGNLVIQFPGLYFIICQLQFLVQCPNNSVDLKLELLIN |
| SIGLEC10ecd | KHIKKQALVTVCESGMQTKHVYQNLSQFLLDYLQVNTTISVNVDTFQYIDT |
| | STFPLENVLSIFLYSNSDASTKGPSVFPLAPCSRSTSESTAALGCLVKDYFPE |
| | PVTVSWNSGALTSGVHTFPAVLQSSGLYSLSSVVTVPSSSLGTKTYTCNVD |
| | HKPSNTKVDKRVESKYGPPCPSCPAPEFLGGPSVFLFPPKPKDTLMISRTPE |
| | VTCVVVDVSQEDPEVQFNWYVDGVEVHNAKTKPREEQFNSTYRVVSVLT |
| | VLHQDWLNGKEYKCKVSNKGLPSSIEKTISKAKGQPREPQVYTLPPSQEEM |
| | TKNQVSLTCLVKGFYPSDIAVEWESNGQPENNYKTTPPVLDSDGSFFLYSR |
| | LTVDKSRWQEGNVFSCSVMHEALHNHYTQKSLSLSLGKGGGGSGGGGSG |
| | GGGSMDGRFWIRVQESVMVPEGLCISVPCSFSYPRQDWTGSTPAYGYWFK |
| | AVTETTKGAPVATNHQSREVEMSTRGRFQLTGDPAKGNCSLVIRDAQMQD |
| | ESQYFFRVERGSYVRYNFMNDGFFLKVTALTQKPDVYIPETLEPGQPVTVI |
| | CVFNWAFEECPPPSFSWTGAALSSQGTKPTTSHFSVLSFTPRPQDHNTDLTC |
| | HVDFSRKGVSAQRTVRLRVAYAPRDLVISISRDNTPALEPQPQGNVPYLEA |
| | QKGQFLRLLCAADSQPPATLSWVLQNRVLSSSHPWGPRPLGLELPGVKAG |
| | DSGRYTCRAENRLGSQQRALDLSVQYPPENLRVMVSQANRTVLENLGNGT |
| | SLPVLEGQSLCLVCVTHSSPPARLSWTQRGQVLSPSQPSDPGVLELPRVQVE |
| | HEGEFTCHARHPLGSQHVSLSLSVHYSPKLLGPSCSWEAEGLHCSCSSQASP |
| | APSLRWWLGEELLEGNSSQDSFEVTPSSAGPWANSSLSLHGGLSSGLRLRC |
| | EAWNVHGAQSGSILQLPDKKGLIST |
| SEQ ID NO: 603 | MDGRFWIRVQESVMVPEGLCISVPCSFSYPRQDWTGSTPAYGYWFKAVTE |
| SIGLEC10ecd- | TTKGAPVATNHQSREVEMSTRGRFQLTGDPAKGNCSLVIRDAQMQDESQY |
| Fc-CD40Lecd | FFRVERGSYVRYNFMNDGFFLKVTALTQKPDVYIPETLEPGQPVTVICVFN |
| | WAFEECPPPSFSWTGAALSSQGTKPTTSHFSVLSFTPRPQDHNTDLTCHVDF |
| | SRKGVSAQRTVRLRVAYAPRDLVISISRDNTPALEPQPQGNVPYLEAQKGQ |
| | FLRLLCAADSQPPATLSWVLQNRVLSSSHPWGPRPLGLELPGVKAGDSGRY |
| | TCRAENRLGSQQRALDLSVQYPPENLRVMVSQANRTVLENLGNGTSLPVL |
| | EGQSLCLVCVTHSSPPARLSWTQRGQVLSPSQPSDPGVLELPRVQVEHEGE |
| | FTCHARHPLGSQHVSLSLSVHYSPKLLGPSCSWEAEGLHCSCSSQASPAPSL |
| | RWWLGEELLEGNSSQDSFEVTPSSAGPWANSSLSLHGGLSSGLRLRCEAW |
| | NVHGAQSGSILQLPDKKGLISTASTKGPSVFPLAPCSRSTSESTAALGCLVK |
| | DYFPEPVTVSWNSGALTSGVHTFPAVLQSSGLYSLSSVVTVPSSSLGTKTYT |
| | CNVDHKPSNTKVDKRVESKYGPPCPSCPAPEFLGGPSVFLFPPKPKDTLMIS |
| | RTPEVTCVVVDVSQEDPEVQFNWYVDGVEVHNAKTKPREEQFNSTYRVV |
| | SVLTVLHQDWLNGKEYKCKVSNKGLPSSIEKTISKAKGQPREPQVYTLPPS |
| | QEEMTKNQVSLTCLVKGFYPSDIAVEWESNGQPENNYKTTPPVLDSDGSFF |
| | LYSRLTVDKSRWQEGNVFSCSVMHEALHNHYTQKSLSLSLGKGGGGSGG |
| | GGSGGGGSGDQNPQIAAHVISEASSKTTSVLQWAEKGYYTMSNNLVTLEN |
| | GKQLTVKRQGLYYIYAQVTFCSNREASSQAPFIASLCLKSPGRFERILLRAA |
| | NTHSSAKPCGQQSIHLGGVFELQPGASVFVNVTDPSQVSHGTGFTSFGLLK |
| | L |
| SEQ ID NO: 604 | GDQNPQIAAHVISEASSKTTSVLQWAEKGYYTMSNNLVTLENGKQLTVKR |
| CD40Lecd-Fc- | QGLYYIYAQVTFCSNREASSQAPFIASLCLKSPGRFERILLRAANTHSSAKPC |
| SIGLEC10ecd | GQQSIHLGGVFELQPGASVFVNVTDPSQVSHGTGFTSFGLLKLASTKGPSVF |
| | PLAPCSRSTSESTAALGCLVKDYFPEPVTVSWNSGALTSGVHTFPAVLQSSG |
| | LYSLSSVVTVPSSSLGTKTYTCNVDHKPSNTKVDKRVESKYGPPCPSCPAPE |
| | FLGGPSVFLFPPKPKDTLMISRTPEVTCVVVDVSQEDPEVQFNWYVDGVEV |
| | HNAKTKPREEQFNSTYRVVSVLTVLHQDWLNGKEYKCKVSNKGLPSSIEK |
| | TISKAKGQPREPQVYTLPPSQEEMTKNQVSLTCLVKGFYPSDIAVEWESNG |
| | QPENNYKTTPPVLDSDGSFFLYSRLTVDKSRWQEGNVFSCSVMHEALHNH |
| | YTQKSLSLSLGKGGGGSGGGGSGGGGSMDGRFWIRVQESVMVPEGLCISV |
| | PCSFSYPRQDWTGSTPAYGYWFKAVTETTKGAPVATNHQSREVEMSTRGR |
| | FQLTGDPAKGNCSLVIRDAQMQDESQYFFRVERGSYVRYNFMNDGFFLKV |
| | TALTQKPDVYIPETLEPGQPVTVICVFNWAFEECPPPSFSWTGAALSSQGTK |
| | PTTSHFSVLSFTPRPQDHNTDLTCHVDFSRKGVSAQRTVRLRVAYAPRDLV |
| | ISISRDNTPALEPQPQGNVPYLEAQKGQFLRLLCAADSQPPATLSWVLQNR |
| | VLSSSHPWGPRPLGLELPGVKAGDSGRYTCRAENRLGSQQRALDLSVQYPP |
| | ENLRVMVSQANRTVLENLGNGTSLPVLEGQSLCLVCVTHSSPPARLSWTQ |
| | RGQVLSPSQPSDPGVLELPRVQVEHEGEFTCHARHPLGSQHVSLSLSVHYSP |
| | KLLGPSCSWEAEGLHCSCSSQASPAPSLRWWLGEELLEGNSSQDSFEVTPSS |
| | AGPWANSSLSLHGGLSSGLRLRCEAWNVHGAQSGSILQLPDKKGLIST |
| SEQ ID NO: 605 | MDGRFWIRVQESVMVPEGLCISVPCSFSYPRQDWTGSTPAYGYWFKAVTE |
| SIGLEC10ecd- | TTKGAPVATNHQSREVEMSTRGRFQLTGDPAKGNCSLVIRDAQMQDESQY |
| Fc-CD70ecd | FFRVERGSYVRYNFMNDGFFLKVTALTQKPDVYIPETLEPGQPVTVICVFN |
| | WAFEECPPPSFSWTGAALSSQGTKPTTSHFSVLSFTPRPQDHNTDLTCHVDF |
| | SRKGVSAQRTVRLRVAYAPRDLVISISRDNTPALEPQPQGNVPYLEAQKGQ |
| | FLRLLCAADSQPPATLSWVLQNRVLSSSHPWGPRPLGLELPGVKAGDSGRY |
| | TCRAENRLGSQQRALDLSVQYPPENLRVMVSQANRTVLENLGNGTSLPVL |
| | EGQSLCLVCVTHSSPPARLSWTQRGQVLSPSQPSDPGVLELPRVQVEHEGE |
| | FTCHARHPLGSQHVSLSLSVHYSPKLLGPSCSWEAEGLHCSCSSQASPAPSL |
| | RWWLGEELLEGNSSQDSFEVTPSSAGPWANSSLSLHGGLSSGLRLRCEAW |
| | NVHGAQSGSILQLPDKKGLISTASTKGPSVFPLAPCSRSTSESTAALGCLVK |
| | DYFPEPVTVSWNSGALTSGVHTFPAVLQSSGLYSLSSVVTVPSSSLGTKTYT |
| | CNVDHKPSNTKVDKRVESKYGPPCPSCPAPEFLGGPSVFLFPPKPKDTLMIS |
| | RTPEVTCVVVDVSQEDPEVQFNWYVDGVEVHNAKTKPREEQFNSTYRVV |
| | SVLTVLHQDWLNGKEYKCKVSNKGLPSSIEKTISKAKGQPREPQVYTLPPS |
| | QEEMTKNQVSLTCLVKGFYPSDIAVEWESNGQPENNYKTTPPVLDSDGSFF |
| | LYSRLTVDKSRWQEGNVFSCSVMHEALHNHYTQKSLSLSLGKGGGGSGG |
| | GGSGGGGSQRFAQAQQQLPLESLGWDVAELQLNHTGPQQDPRLYWQGGP |
| | ALGRSFLHGPELDKGQLRIHRDGIYMVHIQVTLAICSSTTASRHHPTTLAVG |
| | ICSPASRSISLLRLSFHQGCTIASQRLTPLARGDTLCTNLTGTLLPSRNTDETF |
| | FGVQWVRP |
| SEQ ID NO: 606 | QRFAQAQQQLPLESLGWDVAELQLNHTGPQQDPRLYWQGGPALGRSFLH |
| CD70ecd-Fc- | GPELDKGQLRIHRDGIYMVHIQVTLAICSSTTASRHHPTTLAVGICSPASRSI |
| SIGLEC10ecd | SLLRLSFHQGCTIASQRLTPLARGDTLCTNLTGTLLPSRNTDETFFGVQWVR |
| | PASTKGPSVFPLAPCSRSTSESTAALGCLVKDYFPEPVTVSWNSGALTSGVH |
| | TFPAVLQSSGLYSLSSVVTVPSSSLGTKTYTCNVDHKPSNTKVDKRVESKY |
| | GPPCPSCPAPEFLGGPSVFLFPPKPKDTLMISRTPEVTCVVVDVSQEDPEVQF |
| | NWYVDGVEVHNAKTKPREEQFNSTYRVVSVLTVLHQDWLNGKEYKCKV |
| | SNKGLPSSIEKTISKAKGQPREPQVYTLPPSQEEMTKNQVSLTCLVKGFYPS |
| | DIAVEWESNGQPENNYKTTPPVLDSDGSFFLYSRLTVDKSRWQEGNVFSCS |
| | VMHEALHNHYTQKSLSLSLGKGGGGSGGGGSGGGGSMDGRFWIRVQESV |
| | MVPEGLCISVPCSFSYPRQDWTGSTPAYGYWFKAVTETTKGAPVATNHQS |
| | REVEMSTRGRFQLTGDPAKGNCSLVIRDAQMQDESQYFFRVERGSYVRYN |
| | FMNDGFFLKVTALTQKPDVYIPETLEPGQPVTVICVFNWAFEECPPPSFSWT |
| | GAALSSQGTKPTTSHFSVLSFTPRPQDHNTDLTCHVDFSRKGVSAQRTVRL |
| | RVAYAPRDLVISISRDNTPALEPQPQGNVPYLEAQKGQFLRLLCAADSQPP |
| | ATLSWVLQNRVLSSSHPWGPRPLGLELPGVKAGDSGRYTCRAENRLGSQQ |
| | RALDLSVQYPPENLRVMVSQANRTVLENLGNGTSLPVLEGQSLCLVCVTH |
| | SSPPARLSWTQRGQVLSPSQPSDPGVLELPRVQVEHEGEFTCHARHPLGSQ |
| | HVSLSLSVHYSPKLLGPSCSWEAEGLHCSCSSQASPAPSLRWWLGEELLEG |
| | NSSQDSFEVTPSSAGPWANSSLSLHGGLSSGLRLRCEAWNVHGAQSGSILQ |
| | LPDKKGLIST |
| SEQ ID NO: 607 | MDGRFWIRVQESVMVPEGLCISVPCSFSYPRQDWTGSTPAYGYWFKAVTE |
| SIGLEC10ecd- | TTKGAPVATNHQSREVEMSTRGRFQLTGDPAKGNCSLVIRDAQMQDESQY |
| Fc-GITRLecd | FFRVERGSYVRYNFMNDGFFLKVTALTQKPDVYIPETLEPGQPVTVICVFN |
| | WAFEECPPPSFSWTGAALSSQGTKPTTSHFSVLSFTPRPQDHNTDLTCHVDF |
| | SRKGVSAQRTVRLRVAYAPRDLVISISRDNTPALEPQPQGNVPYLEAQKGQ |
| | FLRLLCAADSQPPATLSWVLQNRVLSSSHPWGPRPLGLELPGVKAGDSGRY |
| | TCRAENRLGSQQRALDLSVQYPPENLRVMVSQANRTVLENLGNGTSLPVL |
| | EGQSLCLVCVTHSSPPARLSWTQRGQVLSPSQPSDPGVLELPRVQVEHEGE |
| | FTCHARHPLGSQHVSLSLSVHYSPKLLGPSCSWEAEGLHCSCSSQASPAPSL |
| | RWWLGEELLEGNSSQDSFEVTPSSAGPWANSSLSLHGGLSSGLRLRCEAW |
| | NVHGAQSGSILQLPDKKGLISTASTKGPSVFPLAPCSRSTSESTAALGCLVK |
| | DYFPEPVTVSWNSGALTSGVHTFPAVLQSSGLYSLSSVVTVPSSSLGTKTYT |
| | CNVDHKPSNTKVDKRVESKYGPPCPSCPAPEFLGGPSVFLFPPKPKDTLMIS |
| | RTPEVTCVVVDVSQEDPEVQFNWYVDGVEVHNAKTKPREEQFNSTYRVV |
| | SVLTVLHQDWLNGKEYKCKVSNKGLPSSIEKTISKAKGQPREPQVYTLPPS |
| | QEEMTKNQVSLTCLVKGFYPSDIAVEWESNGQPENNYKTTPPVLDSDGSFF |
| | LYSRLTVDKSRWQEGNVFSCSVMHEALHNHYTQKSLSLSLGKGGGGSGG |
| | GGSGGGGSQLETAKEPCMAKFGPLPSKWQMASSEPPCVNKVSDWKLEILQ |
| | NGLYLIYGQVAPNANYNDVAPFEVRLYKNKDMIQTLTNKSKIQNVGGTYE |
| | LHVGDTIDLIFNSEHQVLKNNTYWGIILLANPQFIS |
| SEQ ID NO: 608 | QLETAKEPCMAKFGPLPSKWQMASSEPPCVNKVSDWKLEILQNGLYLIYG |
| GITRLecd-Fc- | QVAPNANYNDVAPFEVRLYKNKDMIQTLTNKSKIQNVGGTYELHVGDTID |
| SIGLEC10ecd | LIFNSEHQVLKNNTYWGIILLANPQFISASTKGPSVFPLAPCSRSTSESTAAL |
| | GCLVKDYFPEPVTVSWNSGALTSGVHTFPAVLQSSGLYSLSSVVTVPSSSL |
| | GTKTYTCNVDHKPSNTKVDKRVESKYGPPCPSCPAPEFLGGPSVFLFPPKPK |
| | DTLMISRTPEVTCVVVDVSQEDPEVQFNWYVDGVEVHNAKTKPREEQFNS |
| | TYRVVSVLTVLHQDWLNGKEYKCKVSNKGLPSSIEKTISKAKGQPREPQV |
| | YTLPPSQEEMTKNQVSLTCLVKGFYPSDIAVEWESNGQPENNYKTTPPVLD |
| | SDGSFFLYSRLTVDKSRWQEGNVFSCSVMHEALHNHYTQKSLSLSLGKGG |
| | GGSGGGGSGGGGSMDGRFWIRVQESVMVPEGLCISVPCSFSYPRQDWTGS |
| | TPAYGYWFKAVTETTKGAPVATNHQSREVEMSTRGRFQLTGDPAKGNCSL |
| | VIRDAQMQDESQYFFRVERGSYVRYNFMNDGFFLKVTALTQKPDVYIPET |
| | LEPGQPVTVICVFNWAFEECPPPSFSWTGAALSSQGTKPTTSHFSVLSFTPRP |
| | QDHNTDLTCHVDFSRKGVSAQRTVRLRVAYAPRDLVISISRDNTPALEPQP |
| | QGNVPYLEAQKGQFLRLLCAADSQPPATLSWVLQNRVLSSSHPWGPRPLG |
| | LELPGVKAGDSGRYTCRAENRLGSQQRALDLSVQYPPENLRVMVSQANRT |
| | VLENLGNGTSLPVLEGQSLCLVCVTHSSPPARLSWTQRGQVLSPSQPSDPG |
| | VLELPRVQVEHEGEFTCHARHPLGSQHVSLSLSVHYSPKLLGPSCSWEAEG |
| | LHCSCSSQASPAPSLRWWLGEELLEGNSSQDSFEVTPSSAGPWANSSLSLH |
| | GGLSSGLRLRCEAWNVHGAQSGSILQLPDKKGLIST |
| SEQ ID NO: 609 | MDGRFWIRVQESVMVPEGLCISVPCSFSYPRQDWTGSTPAYGYWFKAVTE |
| SIGLEC10ecd- | TTKGAPVATNHQSREVEMSTRGRFQLTGDPAKGNCSLVIRDAQMQDESQY |
| Fc-ICOSLecd | FFRVERGSYVRYNFMNDGFFLKVTALTQKPDVYIPETLEPGQPVTVICVFN |
| | WAFEECPPPSFSWTGAALSSQGTKPTTSHFSVLSFTPRPQDHNTDLTCHVDF |
| | SRKGVSAQRTVRLRVAYAPRDLVISISRDNTPALEPQPQGNVPYLEAQKGQ |
| | FLRLLCAADSQPPATLSWVLQNRVLSSSHPWGPRPLGLELPGVKAGDSGRY |
| | TCRAENRLGSQQRALDLSVQYPPENLRVMVSQANRTVLENLGNGTSLPVL |
| | EGQSLCLVCVTHSSPPARLSWTQRGQVLSPSQPSDPGVLELPRVQVEHEGE |
| | FTCHARHPLGSQHVSLSLSVHYSPKLLGPSCSWEAEGLHCSCSSQASPAPSL |
| | RWWLGEELLEGNSSQDSFEVTPSSAGPWANSSLSLHGGLSSGLRLRCEAW |
| | NVHGAQSGSILQLPDKKGLISTASTKGPSVFPLAPCSRSTSESTAALGCLVK |
| | DYFPEPVTVSWNSGALTSGVHTFPAVLQSSGLYSLSSVVTVPSSSLGTKTYT |
| | CNVDHKPSNTKVDKRVESKYGPPCPSCPAPEFLGGPSVFLFPPKPKDTLMIS |
| | RTPEVTCVVVDVSQEDPEVQFNWYVDGVEVHNAKTKPREEQFNSTYRVV |
| | SVLTVLHQDWLNGKEYKCKVSNKGLPSSIEKTISKAKGQPREPQVYTLPPS |
| | QEEMTKNQVSLTCLVKGFYPSDIAVEWESNGQPENNYKTTPPVLDSDGSFF |
| | LYSRLTVDKSRWQEGNVFSCSVMHEALHNHYTQKSLSLSLGKGGGGSGG |
| | GGSGGGGSDTQEKEVRAMVGSDVELSCACPEGSRFDLNDVYVYWQTSES |
| | KTVVTYHIPQNSSLENVDSRYRNRALMSPAGMLRGDFSLRLFNVTPQDEQ |
| | KFHCLVLSQSLGFQEVLSVEVTLHVAANFSVPVVSAPHSPSQDELTFTCTSI |
| | NGYPRPNVYWINKTDNSLLDQALQNDTVFLNMRGLYDVVSVLRIARTPSV |
| | NIGCCIENVLLQQNLTVGSQTGNDIGERDKITENPVSTGEKNAATWS |
| SEQ ID NO: 610 | DTQEKEVRAMVGSDVELSCACPEGSRFDLNDVYVYWQTSESKTVVTYHIP |
| ICOSLecd-Fc- | QNSSLENVDSRYRNRALMSPAGMLRGDFSLRLFNVTPQDEQKFHCLVLSQ |
| SIGLEC10ec | SLGFQEVLSVEVTLHVAANFSVPVVSAPHSPSQDELTFTCTSINGYPRPNVY |
| | WINKTDNSLLDQALQNDTVFLNMRGLYDVVSVLRIARTPSVNIGCCIENVL |
| | LQQNLTVGSQTGNDIGERDKITENPVSTGEKNAATWSASTKGPSVFPLAPC |
| | SRSTSESTAALGCLVKDYFPEPVTVSWNSGALTSGVHITPAVLQSSGLYSLS |
| | SVVTVPSSSLGTKTYTCNVDHKPSNTKVDKRVESKYGPPCPSCPAPEFLGG |
| | PSVFLFPPKPKDTLMISRTPEVTCVVVDVSQEDPEVQFNWYVDGVEVHNA |
| | KTKPREEQFNSTYRVVSVLTVLHQDWLNGKEYKCKVSNKGLPSSIEKTISK |
| | AKGQPREPQVYTLPPSQEEMTKNQVSLTCLVKGFYPSDIAVEWESNGQPEN |
| | NYKTTPPVLDSDGSFFLYSRLTVDKSRWQEGNVFSCSVMHEALHNHYTQK |
| | SLSLSLGKGGGGSGGGGSGGGGSMDGRFWIRVQESVMVPEGLCISVPCSFS |
| | YPRQDWTGSTPAYGYWFKAVTETTKGAPVATNHQSREVEMSTRGRFQLT |
| | GDPAKGNCSLVIRDAQMQDESQYFFRVERGSYVRYNFMNDGFFLKVTALT |
| | QKPDVYIPETLEPGQPVTVICVFNWAFEECPPPSFSWTGAALSSQGTKPTTS |
| | HFSVLSFTPRPQDHNTDLTCHVDFSRKGVSAQRTVRLRVAYAPRDLVISISR |
| | DNTPALEPQPQGNVPYLEAQKGQFLRLLCAADSQPPATLSWVLQNRVLSSS |
| | HPWGPRPLGLELPGVKAGDSGRYTCRAENRLGSQQRALDLSVQYPPENLR |
| | VMVSQANRTVLENLGNGTSLPVLEGQSLCLVCVTHSSPPARLSWTQRGQV |
| | LSPSQPSDPGVLELPRVQVEHEGEFTCHARHPLGSQHVSLSLSVHYSPKLLG |
| | PSCSWEAEGLHCSCSSQASPAPSLRWWLGEELLEGNSSQDSFEVTPSSAGP |
| | WANSSLSLHGGLSSGLRLRCEAWNVHGAQSGSILQLPDKKGLIST |
| SEQ ID NO: 611 | MDGRFWIRVQESVMVPEGLCISVPCSFSYPRQDWTGSTPAYGYWFKAVTE |
| SIGLEC10ecd- | TTKGAPVATNHQSREVEMSTRGRFQLTGDPAKGNCSLVIRDAQMQDESQY |
| Fc-LIGHTecd | FFRVERGSYVRYNFMNDGFFLKVTALTQKPDVYIPETLEPGQPVTVICVFN |
| | WAFEECPPPSFSWTGAALSSQGTKPTTSHFSVLSFTPRPQDHNTDLTCHVDF |
| | SRKGVSAQRTVRLRVAYAPRDLVISISRDNTPALEPQPQGNVPYLEAQKGQ |
| | FLRLLCAADSQPPATLSWVLQNRVLSSSHPWGPRPLGLELPGVKAGDSGRY |
| | TCRAENRLGSQQRALDLSVQYPPENLRVMVSQANRTVLENLGNGTSLPVL |
| | EGQSLCLVCVTHSSPPARLSWTQRGQVLSPSQPSDPGVLELPRVQVEHEGE |
| | FTCHARHPLGSQHVSLSLSVHYSPKLLGPSCSWEAEGLHCSCSSQASPAPSL |
| | RWWLGEELLEGNSSQDSFEVTPSSAGPWANSSLSLHGGLSSGLRLRCEAW |
| | NVHGAQSGSILQLPDKKGLISTASTKGPSVFPLAPCSRSTSESTAALGCLVK |
| | DYFPEPVTVSWNSGALTSGVHTFPAVLQSSGLYSLSSVVTVPSSSLGTKTYT |
| | CNVDHKPSNTKVDKRVESKYGPPCPSCPAPEFLGGPSVFLFPPKPKDTLMIS |
| | RTPEVTCVVVDVSQEDPEVQFNWYVDGVEVHNAKTKPREEQFNSTYRVV |
| | SVLTVLHQDWLNGKEYKCKVSNKGLPSSIEKTISKAKGQPREPQVYTLPPS |
| | QEEMTKNQVSLTCLVKGFYPSDIAVEWESNGQPENNYKTTPPVLDSDGSFF |
| | LYSRLTVDKSRWQEGNVFSCSVMHEALHNHYTQKSLSLSLGKGGGGSGG |
| | GGSGGGGSDGPAGSWEQLIQERRSHEVNPAAHLTGANSSLTGSGGPLLWE |
| | TQLGLAFLRGLSYHDGALVVTKAGYYYIYSKVQLGGVGCPLGLASTITHG |
| | LYKRTPRYPEELELLVSQQSPCGRATSSSRVWWDSSFLGGVVHLEAGEKV |
| | VVRVLDERLVRLRDGTRSYFGAFMV |
| SEQ ID NO: 612 | DGPAGSWEQLIQERRSHEVNPAAHLTGANSSLTGSGGPLLWETQLGLAFLR |
| LIGHTecd-Fc- | GLSYHDGALVVTKAGYYYIYSKVQLGGVGCPLGLASTITHGLYKRTPRYP |
| SIGLEC10ecd | EELELLVSQQSPCGRATSSSRVWWDSSFLGGVVHLEAGEKVVVRVLDERL |
| | VRLRDGTRSYFGAFMVASTKGPSVFPLAPCSRSTSESTAALGCLVKDYFPEP |
| | VTVSWNSGALTSGVHTFPAVLQSSGLYSLSSVVTVPSSSLGTKTYTCNVDH |
| | KPSNTKVDKRVESKYGPPCPSCPAPEFLGGPSVFLFPPKPKDTLMISRTPEVT |
| | CVVVDVSQEDPEVQFNWYVDGVEVHNAKTKPREEQFNSTYRVVSVLTVL |
| | HQDWLNGKEYKCKVSNKGLPSSIEKTISKAKGQPREPQVYTLPPSQEEMTK |
| | NQVSLTCLVKGFYPSDIAVEWESNGQPENNYKTTPPVLDSDGSFFLYSRLT |
| | VDKSRWQEGNVFSCSVMHEALHNHYTQKSLSLSLGKGGGGSGGGGSGGG |
| | GSMDGRFWIRVQESVMVPEGLCISVPCSFSYPRQDWTGSTPAYGYWFKAV |
| | TETTKGAPVATNHQSREVEMSTRGRFQLTGDPAKGNCSLVIRDAQMQDES |
| | QYFFRVERGSYVRYNFMNDGFFLKVTALTQKPDVYIPETLEPGQPVTVICV |
| | FNWAFEECPPPSFSWTGAALSSQGTKPTTSHFSVLSFTPRPQDHNTDLTCHV |
| | DFSRKGVSAQRTVRLRVAYAPRDLVISISRDNTPALEPQPQGNVPYLEAQK |
| | GQFLRLLCAADSQPPATLSWVLQNRVLSSSHPWGPRPLGLELPGVKAGDS |
| | GRYTCRAENRLGSQQRALDLSVQYPPENLRVMVSQANRTVLENLGNGTSL |
| | PVLEGQSLCLVCVTHSSPPARLSWTQRGQVLSPSQPSDPGVLELPRVQVEH |
| | EGEFTCHARHPLGSQHVSLSLSVHYSPKLLGPSCSWEAEGLHCSCSSQASPA |
| | PSLRWWLGEELLEGNSSQDSFEVTPSSAGPWANSSLSLHGGLSSGLRLRCE |
| | AWNVHGAQSGSILQLPDKKGLIST |
| SEQ ID NO: 613 | MDGRFWIRVQESVMVPEGLCISVPCSFSYPRQDWTGSTPAYGYWFKAVTE |
| SIGLEC10ecd- | TTKGAPVATNHQSREVEMSTRGRFQLTGDPAKGNCSLVIRDAQMQDESQY |
| Fc-OX40Lecd | FFRVERGSYVRYNFMNDGFFLKVTALTQKPDVYIPETLEPGQPVTVICVFN |
| | WAFEECPPPSFSWTGAALSSQGTKPTTSHFSVLSFTPRPQDHNTDLTCHVDF |
| | SRKGVSAQRTVRLRVAYAPRDLVISISRDNTPALEPQPQGNVPYLEAQKGQ |
| | FLRLLCAADSQPPATLSWVLQNRVLSSSHPWGPRPLGLELPGVKAGDSGRY |
| | TCRAENRLGSQQRALDLSVQYPPENLRVMVSQANRTVLENLGNGTSLPVL |
| | EGQSLCLVCVTHSSPPARLSWTQRGQVLSPSQPSDPGVLELPRVQVEHEGE |
| | FTCHARHPLGSQHVSLSLSVHYSPKLLGPSCSWEAEGLHCSCSSQASPAPSL |
| | RWWLGEELLEGNSSQDSFEVTPSSAGPWANSSLSLHGGLSSGLRLRCEAW |
| | NVHGAQSGSILQLPDKKGLISTASTKGPSVFPLAPCSRSTSESTAALGCLVK |
| | DYFPEPVTVSWNSGALTSGVHTFPAVLQSSGLYSLSSVVTVPSSSLGTKTYT |
| | CNVDHKPSNTKVDKRVESKYGPPCPSCPAPEFLGGPSVFLFPPKPKDTLMIS |
| | RTPEVTCVVVDVSQEDPEVQFNWYVDGVEVHNAKTKPREEQFNSTYRVV |
| | SVLTVLHQDWLNGKEYKCKVSNKGLPSSIEKTISKAKGQPREPQVYTLPPS |
| | QEEMTKNQVSLTCLVKGFYPSDIAVEWESNGQPENNYKTTPPVLDSDGSFF |
| | LYSRLTVDKSRWQEGNVFSCSVMHEALHNHYTQKSLSLSLGKGGGGSGG |
| | GGSGGGGSQVSHRYPRIQSIKVQFTEYKKEKGFILTSQKEDEIMKVQNNSVI |
| | INCDGFYLISLKGYFSQEVNISLHYQKDEEPLFQLKKVRSVNSLMVASLTYK |
| | DKVYLNVTTDNTSLDDFHVNGGELILIHQNPGEFCVL |
| SEQ ID NO: 614 | QVSHRYPRIQSIKVQFTEYKKEKGFILTSQKEDEIMKVQNNSVIINCDGFYLI |
| OX40Lecd-Fc- | SLKGYFSQEVNISLHYQKDEEPLFQLKKVRSVNSLMVASLTYKDKVYLNV |
| SIGLEC10ecd | TTDNTSLDDFHVNGGELILIHQNPGEFCVLASTKGPSVFPLAPCSRSTSESTA |
| | ALGCLVKDYFPEPVTVSWNSGALTSGVHTFPAVLQSSGLYSLSSVVTVPSS |
| | SLGTKTYTCNVDHKPSNTKVDKRVESKYGPPCPSCPAPEFLGGPSVFLFPPK |
| | PKDTLMISRTPEVTCVVVDVSQEDPEVQFNWYVDGVEVHNAKTKPREEQF |
| | NSTYRVVSVLTVLHQDWLNGKEYKCKVSNKGLPSSIEKTISKAKGQPREPQ |
| | VYTLPPSQEEMTKNQVSLTCLVKGFYPSDIAVEWESNGQPENNYKTTPPVL |
| | DSDGSFFLYSRLTVDKSRWQEGNVFSCSVMHEALHNHYTQKSLSLSLGKG |
| | GGGSGGGGSGGGGSMDGRFWIRVQESVMVPEGLCISVPCSFSYPRQDWTG |
| | STPAYGYWFKAVTETTKGAPVATNHQSREVEMSTRGRFQLTGDPAKGNCS |
| | LVIRDAQMQDESQYFFRVERGSYVRYNFMNDGFFLKVTALTQKPDVYIPE |
| | TLEPGQPVTVICVFNWAFEECPPPSFSWTGAALSSQGTKPTTSHFSVLSFTPR |
| | PQDHNTDLTCHVDFSRKGVSAQRTVRLRVAYAPRDLVISISRDNTPALEPQ |
| | PQGNVPYLEAQKGQFLRLLCAADSQPPATLSWVLQNRVLSSSHPWGPRPL |
| | GLELPGVKAGDSGRYTCRAENRLGSQQRALDLSVQYPPENLRVMVSQANR |
| | TVLENLGNGTSLPVLEGQSLCLVCVTHSSPPARLSWTQRGQVLSPSQPSDP |
| | GVLELPRVQVEHEGEFTCHARHPLGSQHVSLSLSVHYSPKLLGPSCSWEAE |
| | GLHCSCSSQASPAPSLRWWLGEELLEGNSSQDSFEVTPSSAGPWANSSLSL |
| | HGGLSSGLRLRCEAWNVHGAQSGSILQLPDKKGLIST |
| SEQ ID NO: 615 | TIPPHVQKSVNNDMIVTDNNGAVKFPQLCKFCDVRFSTCDNQKSCMSNCSI |
| TGFbRecd-Fc- | TSICEKPQEVCVAVWRKNDENITLETVCHDPKLPYHDFILEDAASPKCIMKE |
| 41BBLecd | KKKPGETFFMCSCSSDECNDNIIFSEEYNTSNPDASTKGPSVFPLAPCSRSTS |
| | ESTAALGCLVKDYFPEPVTVSWNSGALTSGVHTFPAVLQSSGLYSLSSVVT |
| | VPSSSLGTKTYTCNVDHKPSNTKVDKRVESKYGPPCPSCPAPEFLGGPSVFL |
| | FPPKPKDTLMISRTPEVTCVVVDVSQEDPEVQFNWYVDGVEVHNAKTKPR |
| | EEQFNSTYRVVSVLTVLHQDWLNGKEYKCKVSNKGLPSSIEKTISKAKGQP |
| | REPQVYTLPPSQEEMTKNQVSLTCLVKGFYPSDIAVEWESNGQPENNYKTT |
| | PPVLDSDGSFFLYSRLTVDKSRWQEGNVFSCSVMHEALHNHYTQKSLSLSL |
| | GKGGGGSGGGGSGGGGSACPWAVSGARASPGSAASPRLREGPELSPDDPA |
| | GLLDLRQGMFAQLVAQNVLLIDGPLSWYSDPGLAGVSLTGGLSYKEDTKE |
| | LVVAKAGVYYVFFQLELRRVVAGEGSGSVSLALHLQPLRSAAGAAALALT |
| | VDLPPASSEARNSAFGFQGRLLHLSAGQRLGVHLHTEARARHAWQLTQGA |
| | TVLGLFRVTPEIPAGLPSPRSE |
| SEQ ID NO: 616 | ACPWAVSGARASPGSAASPRLREGPELSPDDPAGLLDLRQGMFAQLVAQN |
| 41BBLecd-Fc- | VLLIDGPLSWYSDPGLAGVSLTGGLSYKEDTKELVVAKAGVYYVFFQLEL |
| TGFbRecd | RRVVAGEGSGSVSLALHLQPLRSAAGAAALALTVDLPPASSEARNSAFGFQ |
| | GRLLHLSAGQRLGVHLHTEARARHAWQLTQGATVLGLFRVTPEIPAGLPSP |
| | RSEASTKGPSVFPLAPCSRSTSESTAALGCLVKDYFPEPVTVSWNSGALTSG |
| | VHTFPAVLQSSGLYSLSSVVTVPSSSLGTKTYTCNVDHKPSNTKVDKRVES |
| | KYGPPCPSCPAPEFLGGPSVFLFPPKPKDTLMISRTPEVTCVVVDVSQEDPE |
| | VQFNWYVDGVEVHNAKTKPREEQFNSTYRVVSVLTVLHQDWLNGKEYK |
| | CKVSNKGLPSSIEKTISKAKGQPREPQVYTLPPSQEEMTKNQVSLTCLVKGF |
| | YPSDIAVEWESNGQPENNYKTTPPVLDSDGSFFLYSRLTVDKSRWQEGNVF |
| | SCSVMHEALHNHYTQKSLSLSLGKGGGGSGGGGSGGGGSTIPPHVQKSVN |
| | NDMIVTDNNGAVKFPQLCKFCDVRFSTCDNQKSCMSNCSITSICEKPQEVC |
| | VAVWRKNDENITLETVCHDPKLPYHDFILEDAASPKCIMKEKKKPGETFFM |
| | CSCSSDECNDNIIFSEEYNTSNPD |
| SEQ ID NO: 617 | TIPPHVQKSVNNDMIVTDNNGAVKFPQLCKFCDVRFSTCDNQKSCMSNCSI |
| TGFbRecd-Fc- | TSICEKPQEVCVAVWRKNDENITLETVCHDPKLPYHDFILEDAASPKCIMKE |
| CD30Lecd | KKKPGETFFMCSCSSDECNDNIIFSEEYNTSNPDASTKGPSVFPLAPCSRSTS |
| | ESTAALGCLVKDYFPEPVTVSWNSGALTSGVHTFPAVLQSSGLYSLSSVVT |
| | VPSSSLGTKTYTCNVDHKPSNTKVDKRVESKYGPPCPSCPAPEFLGGPSVFL |
| | FPPKPKDTLMISRTPEVTCVVVDVSQEDPEVQFNWYVDGVEVHNAKTKPR |
| | EEQFNSTYRVVSVLTVLHQDWLNGKEYKCKVSNKGLPSSIEKTISKAKGQP |
| | REPQVYTLPPSQEEMTKNQVSLTCLVKGFYPSDIAVEWESNGQPENNYKTT |
| | PPVLDSDGSFFLYSRLTVDKSRWQEGNVFSCSVMHEALHNHYTQKSLSLSL |
| | GKGGGGSGGGGSGGGGSQRTDSIPNSPDNVPLKGGNCSEDLLCILKRAPFK |
| | KSWAYLQVAKHLNKTKLSWNKDGILHGVRYQDGNLVIQFPGLYFIICQLQ |
| | FLVQCPNNSVDLKLELLINKHIKKQALVTVCESGMQTKHVYQNLSQFLLD |
| | YLQVNTTISVNVDTFQYIDTSTFPLENVLSIFLYSNSD |
| SEQ ID NO: 618 | QRTDSIPNSPDNVPLKGGNCSEDLLCILKRAPFKKSWAYLQVAKHLNKTKL |
| CD30Lecd-Fc- | SWNKDGILHGVRYQDGNLVIQFPGLYFIICQLQFLVQCPNNSVDLKLELLIN |
| TGFbRecd | KHIKKQALVTVCESGMQTKHVYQNLSQFLLDYLQVNTTISVNVDTFQYIDT |
| | STFPLENVLSIFLYSNSDASTKGPSVFPLAPCSRSTSESTAALGCLVKDYFPE |
| | PVTVSWNSGALTSGVHTFPAVLQSSGLYSLSSVVTVPSSSLGTKTYTCNVD |
| | HKPSNTKVDKRVESKYGPPCPSCPAPEFLGGPSVFLFPPKPKDTLMISRTPE |
| | VTCVVVDVSQEDPEVQFNWYVDGVEVHNAKTKPREEQFNSTYRVVSVLT |
| | VLHQDWLNGKEYKCKVSNKGLPSSIEKTISKAKGQPREPQVYTLPPSQEEM |
| | TKNQVSLTCLVKGFYPSDIAVEWESNGQPENNYKTTPPVLDSDGSFFLYSR |
| | LTVDKSRWQEGNVFSCSVMHEALHNHYTQKSLSLSLGKGGGGSGGGGSG |
| | GGGSTIPPHVQKSVNNDMIVTDNNGAVKFPQLCKFCDVRFSTCDNQKSCM |
| | SNCSITSICEKPQEVCVAVWRKNDENITLETVCHDPKLPYHDFILEDAASPK |
| | CIMKEKKKPGETFFMCSCSSDECNDNIIFSEEYNTSNPD |
| SEQ ID NO: 619 | TIPPHVQKSVNNDMIVTDNNGAVKFPQLCKFCDVRFSTCDNQKSCMSNCSI |
| TGFbRecd-Fc- | TSICEKPQEVCVAVWRKNDENITLETVCHDPKLPYHDFILEDAASPKCIMKE |
| CD40Lecd | KKKPGETFFMCSCSSDECNDNIIFSEEYNTSNPDASTKGPSVFPLAPCSRSTS |
| | ESTAALGCLVKDYFPEPVTVSWNSGALTSGVHTFPAVLQSSGLYSLSSVVT |
| | VPSSSLGTKTYTCNVDHKPSNTKVDKRVESKYGPPCPSCPAPEFLGGPSVFL |
| | FPPKPKDTLMISRTPEVTCVVVDVSQEDPEVQFNWYVDGVEVHNAKTKPR |
| | EEQFNSTYRVVSVLTVLHQDWLNGKEYKCKVSNKGLPSSIEKTISKAKGQP |
| | REPQVYTLPPSQEEMTKNQVSLTCLVKGFYPSDIAVEWESNGQPENNYKTT |
| | PPVLDSDGSFFLYSRLTVDKSRWQEGNVFSCSVMHEALHNHYTQKSLSLSL |
| | GKGGGGSGGGGSGGGGSGDQNPQIAAHVISEASSKTTSVLQWAEKGYYT |
| | MSNNLVTLENGKQLTVKRQGLYYIYAQVTFCSNREASSQAPFIASLCLKSP |
| | GRFERILLRAANTHSSAKPCGQQSIHLGGVFELQPGASVFVNVTDPSQVSH |
| | GTGFTSFGLLKL |
| SEQ ID NO: 620 | GDQNPQIAAHVISEASSKTTSVLQWAEKGYYTMSNNLVTLENGKQLTVKR |
| CD40Lecd-Fc- | QGLYYIYAQVTFCSNREASSQAPFIASLCLKSPGRFERILLRAANTHSSAKPC |
| TGFbRecd | GQQSIHLGGVFELQPGASVFVNVTDPSQVSHGTGFTSFGLLKLASTKGPSVF |
| | PLAPCSRSTSESTAALGCLVKDYFPEPVTVSWNSGALTSGVHTFPAVLQSSG |
| | LYSLSSVVTVPSSSLGTKTYTCNVDHKPSNTKVDKRVESKYGPPCPSCPAPE |
| | FLGGPSVFLFPPKPKDTLMISRTPEVTCVVVDVSQEDPEVQFNWYVDGVEV |
| | HNAKTKPREEQFNSTYRVVSVLTVLHQDWLNGKEYKCKVSNKGLPSSIEK |
| | TISKAKGQPREPQVYTLPPSQEEMTKNQVSLTCLVKGFYPSDIAVEWESNG |
| | QPENNYKTTPPVLDSDGSFFLYSRLTVDKSRWQEGNVFSCSVMHEALHNH |
| | YTQKSLSLSLGKGGGGSGGGGSGGGGSTIPPHVQKSVNNDMIVTDNNGAV |
| | KFPQLCKFCDVRFSTCDNQKSCMSNCSITSICEKPQEVCVAVWRKNDENIT |
| | LETVCHDPKLPYHDFILEDAASPKCIMKEKKKPGETFFMCSCSSDECNDNII |
| | FSEEYNTSNPD |
| SEQ ID NO: 621 | TIPPHVQKSVNNDMIVTDNNGAVKFPQLCKFCDVRFSTCDNQKSCMSNCSI |
| TGFbRecd-Fc- | TSICEKPQEVCVAVWRKNDENITLETVCHDPKLPYHDFILEDAASPKCIMKE |
| CD70ecd | KKKPGETFFMCSCSSDECNDNIIFSEEYNTSNPDASTKGPSVFPLAPCSRSTS |
| | ESTAALGCLVKDYFPEPVTVSWNSGALTSGVHTFPAVLQSSGLYSLSSVVT |
| | VPSSSLGTKTYTCNVDHKPSNTKVDKRVESKYGPPCPSCPAPEFLGGPSVFL |
| | FPPKPKDTLMISRTPEVTCVVVDVSQEDPEVQFNWYVDGVEVHNAKTKPR |
| | EEQFNSTYRVVSVLTVLHQDWLNGKEYKCKVSNKGLPSSIEKTISKAKGQP |
| | REPQVYTLPPSQEEMTKNQVSLTCLVKGFYPSDIAVEWESNGQPENNYKTT |
| | PPVLDSDGSFFLYSRLTVDKSRWQEGNVFSCSVMHEALHNHYTQKSLSLSL |
| | GKGGGGSGGGGSGGGGSQRFAQAQQQLPLESLGWDVAELQLNHTGPQQD |
| | PRLYWQGGPALGRSFLHGPELDKGQLRIHRDGIYMVHIQVTLAICSSTTASR |
| | HHPFILAVGICSPASRSISLLRLSFHQGCTIASQRLTPLARGDTLCTNLTGTL |
| | LPSRNTDETFFGVQWVRP |
| SEQ ID NO: 622 | QRFAQAQQQLPLESLGWDVAELQLNHTGPQQDPRLYWQGGPALGRSFLH |
| CD70ecd-Fc- | GPELDKGQLRIHRDGIYMVHIQVTLAICSSTTASRHHPTTLAVGICSPASRSI |
| TGFbRecd | SLLRLSFHQGCTIASQRLTPLARGDTLCTNLTGTLLPSRNTDETFFGVQWVR |
| | PASTKGPSVFPLAPCSRSTSESTAALGCLVKDYFPEPVTVSWNSGALTSGVH |
| | TFPAVLQSSGLYSLSSVVTVPSSSLGTKTYTCNVDHKPSNTKVDKRVESKY |
| | GPPCPSCPAPEFLGGPSVFLFPPKPKDTLMISRTPEVTCVVVDVSQEDPEVQF |
| | NWYVDGVEVHNAKTKPREEQFNSTYRVVSVLTVLHQDWLNGKEYKCKV |
| | SNKGLPSSIEKTISKAKGQPREPQVYTLPPSQEEMTKNQVSLTCLVKGFYPS |
| | DIAVEWESNGQPENNYKTTPPVLDSDGSFFLYSRLTVDKSRWQEGNVFSCS |
| | VMHEALHNHYTQKSLSLSLGKGGGGSGGGGSGGGGSTIPPHVQKSVNND |
| | MIVTDNNGAVKFPQLCKFCDVRFSTCDNQKSCMSNCSITSICEKPQEVCVA |
| | VWRKNDENITLETVCHDPKLPYHDFILEDAASPKCIMKEKKKPGETFFMCS |
| | CSSDECNDNIIFSEEYNTSNPD |
| SEQ ID NO: 623 | TIPPHVQKSVNNDMIVTDNNGAVKFPQLCKFCDVRFSTCDNQKSCMSNCSI |
| TGFbRecd-Fc- | TSICEKPQEVCVAVWRKNDENITLETVCHDPKLPYHDFILEDAASPKCIMKE |
| GITRLecd | KKKPGETFFMCSCSSDECNDNIIFSEEYNTSNPDASTKGPSVFPLAPCSRSTS |
| | ESTAALGCLVKDYFPEPVTVSWNSGALTSGVHTFPAVLQSSGLYSLSSVVT |
| | VPSSSLGTKTYTCNVDHKPSNTKVDKRVESKYGPPCPSCPAPEFLGGPSVFL |
| | FPPKPKDTLMISRTPEVTCVVVDVSQEDPEVQFNWYVDGVEVHNAKTKPR |
| | EEQFNSTYRVVSVLTVLHQDWLNGKEYKCKVSNKGLPSSIEKTISKAKGQP |
| | REPQVYTLPPSQEEMTKNQVSLTCLVKGFYPSDIAVEWESNGQPENNYKTT |
| | PPVLDSDGSFFLYSRLTVDKSRWQEGNVFSCSVMHEALHNHYTQKSLSLSL |
| | GKGGGGSGGGGSGGGGSQLETAKEPCMAKFGPLPSKWQMASSEPPCVNK |
| | VSDWKLEILQNGLYLIYGQVAPNANYNDVAPFEVRLYKNKDMIQTLTNKS |
| | KIQNVGGTYELHVGDTIDLIFNSEHQVLKNNTYWGIILLANPQFIS |
| SEQ ID NO: 624 | QLETAKEPCMAKFGPLPSKWQMASSEPPCVNKVSDWKLEILQNGLYLIYG |
| GITRLecd-Fc- | QVAPNANYNDVAPFEVRLYKNKDMIQTLTNKSKIQNVGGTYELHVGDTID |
| TGFbRecd | LIFNSEHQVLKNNTYWGIILLANPQFISASTKGPSVFPLAPCSRSTSESTAAL |
| | GCLVKDYFPEPVTVSWNSGALTSGVHTFPAVLQSSGLYSLSSVVTVPSSSL |
| | GTKTYTCNVDHKPSNTKVDKRVESKYGPPCPSCPAPEFLGGPSVFLFPPKPK |
| | DTLMISRTPEVTCVVVDVSQEDPEVQFNWYVDGVEVHNAKTKPREEQFNS |
| | TYRVVSVLTVLHQDWLNGKEYKCKVSNKGLPSSIEKTISKAKGQPREPQV |
| | YTLPPSQEEMTKNQVSLTCLVKGFYPSDIAVEWESNGQPENNYKTTPPVLD |
| | SDGSFFLYSRLTVDKSRWQEGNVFSCSVMHEALHNHYTQKSLSLSLGKGG |
| | GGSGGGGSGGGGSTIPPHVQKSVNNDMIVTDNNGAVKFPQLCKFCDVRFS |
| | TCDNQKSCMSNCSITSICEKPQEVCVAVWRKNDENITLETVCHDPKLPYHD |
| | FILEDAASPKCIMKEKKKPGETFFMCSCSSDECNDNIIFSEEYNTSNPD |
| SEQ ID NO: 625 | TIPPHVQKSVNNDMIVTDNNGAVKFPQLCKFCDVRFSTCDNQKSCMSNCSI |
| TGFbRecd-Fc- | TSICEKPQEVCVAVWRKNDENITLETVCHDPKLPYHDFILEDAASPKCIMKE |
| ICOSLecd | KKKPGETFFMCSCSSDECNDNIIFSEEYNTSNPDASTKGPSVFPLAPCSRSTS |
| | ESTAALGCLVKDYFPEPVTVSWNSGALTSGVHTFPAVLQSSGLYSLSSVVT |
| | VPSSSLGTKTYTCNVDHKPSNTKVDKRVESKYGPPCPSCPAPEFLGGPSVFL |
| | FPPKPKDTLMISRTPEVTCVVVDVSQEDPEVQFNWYVDGVEVHNAKTKPR |
| | EEQFNSTYRVVSVLTVLHQDWLNGKEYKCKVSNKGLPSSIEKTISKAKGQP |
| | REPQVYTLPPSQEEMTKNQVSLTCLVKGFYPSDIAVEWESNGQPENNYKTT |
| | PPVLDSDGSFFLYSRLTVDKSRWQEGNVFSCSVMHEALHNHYTQKSLSLSL |
| | GKGGGGSGGGGSGGGGSDTQEKEVRAMVGSDVELSCACPEGSRFDLNDV |
| | YVYWQTSESKTVVTYHIPQNSSLENVDSRYRNRALMSPAGMLRGDFSLRL |
| | FNVTPQDEQKFHCLVLSQSLGFQEVLSVEVTLHVAANFSVPVVSAPHSPSQ |
| | DELTFTCTSINGYPRPNVYWINKTDNSLLDQALQNDTVFLNMRGLYDVVS |
| | VLRIARTPSVNIGCCIENVLLQQNLTVGSQTGNDIGERDKITENPVSTGEKN |
| | AATWS |
| SEQ ID NO: 626 | DTQEKEVRAMVGSDVELSCACPEGSRFDLNDVYVYWQTSESKTVVTYHIP |
| ICOSLecd-Fc- | QNSSLENVDSRYRNRALMSPAGMLRGDFSLRLFNVTPQDEQKFHCLVLSQ |
| TGFbRecd | SLGFQEVLSVEVTLHVAANFSVPVVSAPHSPSQDELTFTCTSINGYPRPNVY |
| | WINKTDNSLLDQALQNDTVFLNMRGLYDVVSVLRIARTPSVNIGCCIENVL |
| | LQQNLTVGSQTGNDIGERDKITENPVSTGEKNAATWSASTKGPSVFPLAPC |
| | SRSTSESTAALGCLVKDYFPEPVTVSWNSGALTSGVHITPAVLQSSGLYSLS |
| | SVVTVPSSSLGTKTYTCNVDHKPSNTKVDKRVESKYGPPCPSCPAPEFLGG |
| | PSVFLFPPKPKDTLMISRTPEVTCVVVDVSQEDPEVQFNWYVDGVEVHNA |
| | KTKPREEQFNSTYRVVSVLTVLHQDWLNGKEYKCKVSNKGLPSSIEKTISK |
| | AKGQPREPQVYTLPPSQEEMTKNQVSLTCLVKGFYPSDIAVEWESNGQPEN |
| | NYKTTPPVLDSDGSFFLYSRLTVDKSRWQEGNVFSCSVMHEALHNHYTQK |
| | SLSLSLGKGGGGSGGGGSGGGGSTIPPHVQKSVNNDMIVTDNNGAVKFPQ |
| | LCKFCDVRFSTCDNQKSCMSNCSITSICEKPQEVCVAVWRKNDENITLETV |
| | CHDPKLPYHDFILEDAASPKCIMKEKKKPGETFFMCSCSSDECNDNIIFSEEY |
| | NTSNPD |
| SEQ ID NO: 627 | TIPPHVQKSVNNDMIVTDNNGAVKFPQLCKFCDVRFSTCDNQKSCMSNCSI |
| TGFbRecd-Fc- | TSICEKPQEVCVAVWRKNDENITLETVCHDPKLPYHDFILEDAASPKCIMKE |
| LIGHTecd | KKKPGETFFMCSCSSDECNDNIIFSEEYNTSNPDASTKGPSVFPLAPCSRSTS |
| | ESTAALGCLVKDYFPEPVTVSWNSGALTSGVHTFPAVLQSSGLYSLSSVVT |
| | VPSSSLGTKTYTCNVDHKPSNTKVDKRVESKYGPPCPSCPAPEFLGGPSVFL |
| | FPPKPKDTLMISRTPEVTCVVVDVSQEDPEVQFNWYVDGVEVHNAKTKPR |
| | EEQFNSTYRVVSVLTVLHQDWLNGKEYKCKVSNKGLPSSIEKTISKAKGQP |
| | REPQVYTLPPSQEEMTKNQVSLTCLVKGFYPSDIAVEWESNGQPENNYKTT |
| | PPVLDSDGSFFLYSRLTVDKSRWQEGNVFSCSVMHEALHNHYTQKSLSLSL |
| | GKGGGGSGGGGSGGGGSDGPAGSWEQLIQERRSHEVNPAAHLTGANSSLT |
| | GSGGPLLWETQLGLAFLRGLSYHDGALVVTKAGYYYIYSKVQLGGVGCPL |
| | GLASTITHGLYKRTPRYPEELELLVSQQSPCGRATSSSRVWWDSSFLGGVV |
| | HLEAGEKVVVRVLDERLVRLRDGTRSYFGAFMV |
| SEQ ID NO: 628 | DGPAGSWEQLIQERRSHEVNPAAHLTGANSSLTGSGGPLLWETQLGLAFLR |
| LIGHTecd-Fc- | GLSYHDGALVVTKAGYYYIYSKVQLGGVGCPLGLASTITHGLYKRTPRYP |
| TGFbRecd | EELELLVSQQSPCGRATSSSRVWWDSSFLGGVVHLEAGEKVVVRVLDERL |
| | VRLRDGTRSYFGAFMVASTKGPSVFPLAPCSRSTSESTAALGCLVKDYFPEP |
| | VTVSWNSGALTSGVHTFPAVLQSSGLYSLSSVVTVPSSSLGTKTYTCNVDH |
| | KPSNTKVDKRVESKYGPPCPSCPAPEFLGGPSVFLFPPKPKDTLMISRTPEVT |
| | CVVVDVSQEDPEVQFNWYVDGVEVHNAKTKPREEQFNSTYRVVSVLTVL |
| | HQDWLNGKEYKCKVSNKGLPSSIEKTISKAKGQPREPQVYTLPPSQEEMTK |
| | NQVSLTCLVKGFYPSDIAVEWESNGQPENNYKTTPPVLDSDGSFFLYSRLT |
| | VDKSRWQEGNVFSCSVMHEALHNHYTQKSLSLSLGKGGGGSGGGGSGGG |
| | GSTIPPHVQKSVNNDMIVTDNNGAVKFPQLCKFCDVRFSTCDNQKSCMSN |
| | CSITSICEKPQEVCVAVWRKNDENITLETVCHDPKLPYHDFILEDAASPKCI |
| | MKEKKKPGETFFMCSCSSDECNDNIIFSEEYNTSNPD |
| SEQ ID NO: 629 | TIPPHVQKSVNNDMIVTDNNGAVKFPQLCKFCDVRFSTCDNQKSCMSNCSI |
| TGFbRecd-Fc- | TSICEKPQEVCVAVWRKNDENITLETVCHDPKLPYHDFILEDAASPKCIMKE |
| OX40Lecd | KKKPGETFFMCSCSSDECNDNIIFSEEYNTSNPDASTKGPSVFPLAPCSRSTS |
| | ESTAALGCLVKDYFPEPVTVSWNSGALTSGVHTFPAVLQSSGLYSLSSVVT |
| | VPSSSLGTKTYTCNVDHKPSNTKVDKRVESKYGPPCPSCPAPEFLGGPSVFL |
| | FPPKPKDTLMISRTPEVTCVVVDVSQEDPEVQFNWYVDGVEVHNAKTKPR |
| | EEQFNSTYRVVSVLTVLHQDWLNGKEYKCKVSNKGLPSSIEKTISKAKGQP |
| | REPQVYTLPPSQEEMTKNQVSLTCLVKGFYPSDIAVEWESNGQPENNYKTT |
| | PPVLDSDGSFFLYSRLTVDKSRWQEGNVFSCSVMHEALHNHYTQKSLSLSL |
| | GKGGGGSGGGGSGGGGSQVSHRYPRIQSIKVQFTEYKKEKGFILTSQKEDEI |
| | MKVQNNSVIINCDGFYLISLKGYFSQEVNISLHYQKDEEPLFQLKKVRSVNS |
| | LMVASLTYKDKVYLNVTTDNTSLDDFHVNGGELILIHQNPGEFCVL |
| SEQ ID NO: 630 | QVSHRYPRIQSIKVQFTEYKKEKGFILTSQKEDEIMKVQNNSVIINCDGFYLI |
| OX40Lecd-Fc- | SLKGYFSQEVNISLHYQKDEEPLFQLKKVRSVNSLMVASLTYKDKVYLNV |
| TGFbRecd | TTDNTSLDDFHVNGGELILIHQNPGEFCVLASTKGPSVFPLAPCSRSTSESTA |
| | ALGCLVKDYFPEPVTVSWNSGALTSGVHTFPAVLQSSGLYSLSSVVTVPSS |
| | SLGTKTYTCNVDHKPSNTKVDKRVESKYGPPCPSCPAPEFLGGPSVFLFPPK |
| | PKDTLMISRTPEVTCVVVDVSQEDPEVQFNWYVDGVEVHNAKTKPREEQF |
| | NSTYRVVSVLTVLHQDWLNGKEYKCKVSNKGLPSSIEKTISKAKGQPREPQ |
| | VYTLPPSQEEMTKNQVSLTCLVKGFYPSDIAVEWESNGQPENNYKTTPPVL |
| | DSDGSFFLYSRLTVDKSRWQEGNVFSCSVMHEALHNHYTQKSLSLSLGKG |
| | GGGSGGGGSGGGGSTIPPHVQKSVNNDMIVTDNNGAVKFPQLCKFCDVRF |
| | STCDNQKSCMSNCSITSICEKPQEVCVAVWRKNDENITLETVCHDPKLPYH |
| | DFILEDAASPKCIMKEKKKPGETFFMCSCSSDECNDNIIFSEEYNTSNPD |
| SEQ ID NO: 631 | SDTGRPFVEMYSEIPEIIHMTEGRELVIPCRVTSPNITVTLKKFPLDTLIPDGK |
| VEGFRecd-Fc- | RIIWDSRKGFIISNATYKEIGLLTCEATVNGHLYKTNYLTHRQTNTIIDVVLS |
| 41BBLecd | PSHGIELSVGEKLVLNCTARTELNVGIDFNWEYPSSKHQHKKLVNRDLKTQ |
| | SGSEMKKFLSTLTIDGVTRSDQGLYTCAASSGLMTKKNSTFVRVHEKASTK |
| | GPSVFPLAPCSRSTSESTAALGCLVKDYFPEPVTVSWNSGALTSGVHTFPAV |
| | LQSSGLYSLSSVVTVPSSSLGTKTYTCNVDHKPSNTKVDKRVESKYGPPCPS |
| | CPAPEFLGGPSVFLFPPKPKDTLMISRTPEVTCVVVDVSQEDPEVQFNWYV |
| | DGVEVHNAKTKPREEQFNSTYRVVSVLTVLHQDWLNGKEYKCKVSNKGL |
| | PSSIEKTISKAKGQPREPQVYTLPPSQEEMTKNQVSLTCLVKGFYPSDIAVE |
| | WESNGQPENNYKTTPPVLDSDGSFFLYSRLTVDKSRWQEGNVFSCSVMHE |
| | ALHNHYTQKSLSLSLGKGGGGSGGGGSGGGGSACPWAVSGARASPGSAA |
| | SPRLREGPELSPDDPAGLLDLRQGMFAQLVAQNVLLIDGPLSWYSDPGLAG |
| | VSLTGGLSYKEDTKELVVAKAGVYYVFFQLELRRVVAGEGSGSVSLALHL |
| | QPLRSAAGAAALALTVDLPPASSEARNSAFGFQGRLLHLSAGQRLGVHLHT |
| | EARARHAWQLTQGATVLGLFRVTPEIPAGLPSPRSE |
| SEQ ID NO: 632 | ACPWAVSGARASPGSAASPRLREGPELSPDDPAGLLDLRQGMFAQLVAQN |
| 41BBLecd-Fc- | VLLIDGPLSWYSDPGLAGVSLTGGLSYKEDTKELVVAKAGVYYVFFQLEL |
| VEGFRecd | RRVVAGEGSGSVSLALHLQPLRSAAGAAALALTVDLPPASSEARNSAFGFQ |
| | GRLLHLSAGQRLGVHLHTEARARHAWQLTQGATVLGLFRVTPEIPAGLPSP |
| | RSEASTKGPSVFPLAPCSRSTSESTAALGCLVKDYFPEPVTVSWNSGALTSG |
| | VHTFPAVLQSSGLYSLSSVVTVPSSSLGTKTYTCNVDHKPSNTKVDKRVES |
| | KYGPPCPSCPAPEFLGGPSVFLFPPKPKDTLMISRTPEVTCVVVDVSQEDPE |
| | VQFNWYVDGVEVHNAKTKPREEQFNSTYRVVSVLTVLHQDWLNGKEYK |
| | CKVSNKGLPSSIEKTISKAKGQPREPQVYTLPPSQEEMTKNQVSLTCLVKGF |
| | YPSDIAVEWESNGQPENNYKTTPPVLDSDGSFFLYSRLTVDKSRWQEGNVF |
| | SCSVMHEALHNHYTQKSLSLSLGKGGGGSGGGGSGGGGSSDTGRPFVEMY |
| | SEIPEIIHMTEGRELVIPCRVTSPNITVTLKKFPLDTLIPDGKRIIWDSRKGFIIS |
| | NATYKEIGLLTCEATVNGHLYKTNYLTHRQTNTIIDVVLSPSHGIELSVGEK |
| | LVLNCTARTELNVGIDFNWEYPSSKHQHKKLVNRDLKTQSGSEMKKFLST |
| | LTIDGVTRSDQGLYTCAASSGLMTKKNSTFVRVHEK |
| SEQ ID NO: 633 | SDTGRPFVEMYSEIPEIIHMTEGRELVIPCRVTSPNITVTLKKFPLDTLIPDGK |
| VEGFRecd-Fc- | RIIWDSRKGFIISNATYKEIGLLTCEATVNGHLYKTNYLTHRQTNTIIDVVLS |
| CD30Lecd | PSHGIELSVGEKLVLNCTARTELNVGIDFNWEYPSSKHQHKKLVNRDLKTQ |
| | SGSEMKKFLSTLTIDGVTRSDQGLYTCAASSGLMTKKNSTFVRVHEKASTK |
| | GPSVFPLAPCSRSTSESTAALGCLVKDYFPEPVTVSWNSGALTSGVHTFPAV |
| | LQSSGLYSLSSVVTVPSSSLGTKTYTCNVDHKPSNTKVDKRVESKYGPPCPS |
| | CPAPEFLGGPSVFLFPPKPKDTLMISRTPEVTCVVVDVSQEDPEVQFNWYV |
| | DGVEVHNAKTKPREEQFNSTYRVVSVLTVLHQDWLNGKEYKCKVSNKGL |
| | PSSIEKTISKAKGQPREPQVYTLPPSQEEMTKNQVSLTCLVKGFYPSDIAVE |
| | WESNGQPENNYKTTPPVLDSDGSFFLYSRLTVDKSRWQEGNVFSCSVMHE |
| | ALHNHYTQKSLSLSLGKGGGGSGGGGSGGGGSQRTDSIPNSPDNVPLKGG |
| | NCSEDLLCILKRAPFKKSWAYLQVAKHLNKTKLSWNKDGILHGVRYQDG |
| | NLVIQFPGLYFIICQLQFLVQCPNNSVDLKLELLINKHIKKQALVTVCESGM |
| | QTKHVYQNLSQFLLDYLQVNTTISVNVDTFQYIDTSTFPLENVLSIFLYSNS |
| | D |
| SEQ ID NO: 634 | QRTDSIPNSPDNVPLKGGNCSEDLLCILKRAPFKKSWAYLQVAKHLNKTKL |
| CD30Lecd-Fc- | SWNKDGILHGVRYQDGNLVIQFPGLYFIICQLQFLVQCPNNSVDLKLELLIN |
| VEGFRecd | KHIKKQALVTVCESGMQTKHVYQNLSQFLLDYLQVNTTISVNVDTFQYIDT |
| | STFPLENVLSIFLYSNSDASTKGPSVFPLAPCSRSTSESTAALGCLVKDYFPE |
| | PVTVSWNSGALTSGVHTFPAVLQSSGLYSLSSVVTVPSSSLGTKTYTCNVD |
| | HKPSNTKVDKRVESKYGPPCPSCPAPEFLGGPSVFLFPPKPKDTLMISRTPE |
| | VTCVVVDVSQEDPEVQFNWYVDGVEVHNAKTKPREEQFNSTYRVVSVLT |
| | VLHQDWLNGKEYKCKVSNKGLPSSIEKTISKAKGQPREPQVYTLPPSQEEM |
| | TKNQVSLTCLVKGFYPSDIAVEWESNGQPENNYKTTPPVLDSDGSFFLYSR |
| | LTVDKSRWQEGNVFSCSVMHEALHNHYTQKSLSLSLGKGGGGSGGGGSG |
| | GGGSSDTGRPFVEMYSEIPEIIHMTEGRELVIPCRVTSPNITVTLKKFPLDTLI |
| | PDGKRIIWDSRKGFIISNATYKEIGLLTCEATVNGHLYKTNYLTHRQTNTIID |
| | VVLSPSHGIELSVGEKLVLNCTARTELNVGIDFNWEYPSSKHQHKKLVNRD |
| | LKTQSGSEMKKFLSTLTIDGVTRSDQGLYTCAASSGLMTKKNSTFVRVHEK |
| SEQ ID NO: 635 | SDTGRPFVEMYSEIPEIIHMTEGRELVIPCRVTSPNITVTLKKFPLDTLIPDGK |
| VEGFRecd-Fc- | RIIWDSRKGFIISNATYKEIGLLTCEATVNGHLYKTNYLTHRQTNTIIDVVLS |
| CD40Lecd | PSHGIELSVGEKLVLNCTARTELNVGIDFNWEYPSSKHQHKKLVNRDLKTQ |
| | SGSEMKKFLSTLTIDGVTRSDQGLYTCAASSGLMTKKNSTFVRVHEKASTK |
| | GPSVFPLAPCSRSTSESTAALGCLVKDYFPEPVTVSWNSGALTSGVHITPAV |
| | LQSSGLYSLSSVVTVPSSSLGTKTYTCNVDHKPSNTKVDKRVESKYGPPCPS |
| | CPAPEFLGGPSVFLFPPKPKDTLMISRTPEVTCVVVDVSQEDPEVQFNWYV |
| | DGVEVHNAKTKPREEQFNSTYRVVSVLTVLHQDWLNGKEYKCKVSNKGL |
| | PSSIEKTISKAKGQPREPQVYTLPPSQEEMTKNQVSLTCLVKGFYPSDIAVE |
| | WESNGQPENNYKTTPPVLDSDGSFFLYSRLTVDKSRWQEGNVFSCSVMHE |
| | ALHNHYTQKSLSLSLGKGGGGSGGGGSGGGGSGDQNPQIAAHVISEASSKT |
| | TSVLQWAEKGYYTMSNNLVTLENGKQLTVKRQGLYYIYAQVTFCSNREA |
| | SSQAPFIASLCLKSPGRFERILLRAANTHSSAKPCGQQSIHLGGVFELQPGAS |
| | VFVNVTDPSQVSHGTGFTSFGLLKL |
| SEQ ID NO: 636 | GDQNPQIAAHVISEASSKTTSVLQWAEKGYYTMSNNLVTLENGKQLTVKR |
| CD40Lecd-Fc- | QGLYYIYAQVTFCSNREASSQAPFIASLCLKSPGRFERILLRAANTHSSAKPC |
| VEGFRecd | GQQSIHLGGVFELQPGASVFVNVTDPSQVSHGTGFTSFGLLKLASTKGPSVF |
| | PLAPCSRSTSESTAALGCLVKDYFPEPVTVSWNSGALTSGVHTFPAVLQSSG |
| | LYSLSSVVTVPSSSLGTKTYTCNVDHKPSNTKVDKRVESKYGPPCPSCPAPE |
| | FLGGPSVFLFPPKPKDTLMISRTPEVTCVVVDVSQEDPEVQFNWYVDGVEV |
| | HNAKTKPREEQFNSTYRVVSVLTVLHQDWLNGKEYKCKVSNKGLPSSIEK |
| | TISKAKGQPREPQVYTLPPSQEEMTKNQVSLTCLVKGFYPSDIAVEWESNG |
| | QPENNYKTTPPVLDSDGSFFLYSRLTVDKSRWQEGNVFSCSVMHEALHNH |
| | YTQKSLSLSLGKGGGGSGGGGSGGGGSSDTGRPFVEMYSEIPEIIHMTEGRE |
| | LVIPCRVTSPNITVTLKKFPLDTLIPDGKRIIWDSRKGFIISNATYKEIGLLTCE |
| | ATVNGHLYKTNYLTHRQTNTIIDVVLSPSHGIELSVGEKLVLNCTARTELN |
| | VGIDFNWEYPSSKHQHKKLVNRDLKTQSGSEMKKFLSTLTIDGVTRSDQGL |
| | YTCAASSGLMTKKNSTFVRVHEK |
| SEQ ID NO: 637 | SDTGRPFVEMYSEIPEIIHMTEGRELVIPCRVTSPNITVTLKKFPLDTLIPDGK |
| VEGFRecd-Fc- | RIIWDSRKGFIISNATYKEIGLLTCEATVNGHLYKTNYLTHRQTNTIIDVVLS |
| CD70ecd | PSHGIELSVGEKLVLNCTARTELNVGIDFNWEYPSSKHQHKKLVNRDLKTQ |
| | SGSEMKKFLSTLTIDGVTRSDQGLYTCAASSGLMTKKNSTFVRVHEKASTK |
| | GPSVFPLAPCSRSTSESTAALGCLVKDYFPEPVTVSWNSGALTSGVHITPAV |
| | LQSSGLYSLSSVVTVPSSSLGTKTYTCNVDHKPSNTKVDKRVESKYGPPCPS |
| | CPAPEFLGGPSVFLFPPKPKDTLMISRTPEVTCVVVDVSQEDPEVQFNWYV |
| | DGVEVHNAKTKPREEQFNSTYRVVSVLTVLHQDWLNGKEYKCKVSNKGL |
| | PSSIEKTISKAKGQPREPQVYTLPPSQEEMTKNQVSLTCLVKGFYPSDIAVE |
| | WESNGQPENNYKTTPPVLDSDGSFFLYSRLTVDKSRWQEGNVFSCSVMHE |
| | ALHNHYTQKSLSLSLGKGGGGSGGGGSGGGGSQRFAQAQQQLPLESLGW |
| | DVAELQLNHTGPQQDPRLYWQGGPALGRSFLHGPELDKGQLRIHRDGIYM |
| | VHIQVTLAICSSTTASRHHPTTLAVGICSPASRSISLLRLSFHQGCTIASQRLT |
| | PLARGDTLCTNLTGTLLPSRNTDEIFFGVQWVRP |
| SEQ ID NO: 638 | QRFAQAQQQLPLESLGWDVAELQLNHTGPQQDPRLYWQGGPALGRSFLH |
| CD70ecd-Fc - | GPELDKGQLRIHRDGIYMVHIQVTLAICSSTTASRHHPTTLAVGICSPASRSI |
| VEGFRecd | SLLRLSFHQGCTIASQRLTPLARGDTLCTNLTGTLLPSRNTDETFFGVQWVR |
| | PASTKGPSVFPLAPCSRSTSESTAALGCLVKDYFPEPVTVSWNSGALTSGVH |
| | TFPAVLQSSGLYSLSSVVTVPSSSLGTKTYTCNVDHKPSNTKVDKRVESKY |
| | GPPCPSCPAPEFLGGPSVFLFPPKPKDTLMISRTPEVTCVVVDVSQEDPEVQF |
| | NWYVDGVEVHNAKTKPREEQFNSTYRVVSVLTVLHQDWLNGKEYKCKV |
| | SNKGLPSSIEKTISKAKGQPREPQVYTLPPSQEEMTKNQVSLTCLVKGFYPS |
| | DIAVEWESNGQPENNYKTTPPVLDSDGSFFLYSRLTVDKSRWQEGNVFSCS |
| | VMHEALHNHYTQKSLSLSLGKGGGGSGGGGSGGGGSSDTGRPFVEMYSEI |
| | PEIIHMTEGRELVIPCRVTSPNITVTLKKFPLDTLIPDGKRIIWDSRKGFIISNA |
| | TYKEIGLLTCEATVNGHLYKTNYLTHRQTNTIIDVVLSPSHGIELSVGEKLV |
| | LNCTARTELNVGIDFNWEYPSSKHQHKKLVNRDLKTQSGSEMKKFLSTLTI |
| | DGVTRSDQGLYTCAASSGLMTKKNSTFVRVHEK |
| SEQ ID NO: 639 | SDTGRPFVEMYSEIPEIIHMTEGRELVIPCRVTSPNITVTLKKFPLDTLIPDGK |
| VEGFRecd-Fc- | RIIWDSRKGFIISNATYKEIGLLTCEATVNGHLYKTNYLTHRQTNTIIDVVLS |
| GITRLecd | PSHGIELSVGEKLVLNCTARTELNVGIDFNWEYPSSKHQHKKLVNRDLKTQ |
| | SGSEMKKFLSTLTIDGVTRSDQGLYTCAASSGLMTKKNSTFVRVHEKASTK |
| | GPSVFPLAPCSRSTSESTAALGCLVKDYFPEPVTVSWNSGALTSGVHITPAV |
| | LQSSGLYSLSSVVTVPSSSLGTKTYTCNVDHKPSNTKVDKRVESKYGPPCPS |
| | CPAPEFLGGPSVFLFPPKPKDTLMISRTPEVTCVVVDVSQEDPEVQFNWYV |
| | DGVEVHNAKTKPREEQFNSTYRVVSVLTVLHQDWLNGKEYKCKVSNKGL |
| | PSSIEKTISKAKGQPREPQVYTLPPSQEEMTKNQVSLTCLVKGFYPSDIAVE |
| | WESNGQPENNYKTTPPVLDSDGSFFLYSRLTVDKSRWQEGNVFSCSVMHE |
| | ALHNHYTQKSLSLSLGKGGGGSGGGGSGGGGSQLETAKEPCMAKFGPLPS |
| | KWQMASSEPPCVNKVSDWKLEILQNGLYLIYGQVAPNANYNDVAPFEVRL |
| | YKNKDMIQTLTNKSKIQNVGGTYELHVGDTIDLIFNSEHQVLKNNTYWGII |
| | LLANPQFIS |
| SEQ ID NO: 640 | QLETAKEPCMAKFGPLPSKWQMASSEPPCVNKVSDWKLEILQNGLYLIYG |
| GITRLecd-Fc- | QVAPNANYNDVAPFEVRLYKNKDMIQTLTNKSKIQNVGGTYELHVGDTID |
| VEGFRecd | LIFNSEHQVLKNNTYWGIILLANPQFISASTKGPSVFPLAPCSRSTSESTAAL |
| | GCLVKDYFPEPVTVSWNSGALTSGVHTFPAVLQSSGLYSLSSVVTVPSSSL |
| | GTKTYTCNVDHKPSNTKVDKRVESKYGPPCPSCPAPEFLGGPSVFLFPPKPK |
| | DTLMISRTPEVTCVVVDVSQEDPEVQFNWYVDGVEVHNAKTKPREEQFNS |
| | TYRVVSVLTVLHQDWLNGKEYKCKVSNKGLPSSIEKTISKAKGQPREPQV |
| | YTLPPSQEEMTKNQVSLTCLVKGFYPSDIAVEWESNGQPENNYKTTPPVLD |
| | SDGSFFLYSRLTVDKSRWQEGNVFSCSVMHEALHNHYTQKSLSLSLGKGG |
| | GGSGGGGSGGGGSSDTGRPFVEMYSEIPEIIHMTEGRELVIPCRVTSPNITVT |
| | LKKFPLDTLIPDGKRIIWDSRKGFIISNATYKEIGLLTCEATVNGHLYKTNYL |
| | THRQTNTIIDVVLSPSHGIELSVGEKLVLNCTARTELNVGIDFNWEYPSSKH |
| | QHKKLVNRDLKTQSGSEMKKFLSTLTIDGVTRSDQGLYTCAASSGLMTKK |
| | NSTFVRVHEK |
| SEQ ID NO: 641 | SDTGRPFVEMYSEIPEIIHMTEGRELVIPCRVTSPNITVTLKKFPLDTLIPDGK |
| VEGFRecd-Fc- | RIIWDSRKGFIISNATYKEIGLLTCEATVNGHLYKTNYLTHRQTNTIIDVVLS |
| ICOSLecd | PSHGIELSVGEKLVLNCTARTELNVGIDFNWEYPSSKHQHKKLVNRDLKTQ |
| | SGSEMKKFLSTLTIDGVTRSDQGLYTCAASSGLMTKKNSTFVRVHEKASTK |
| | GPSVFPLAPCSRSTSESTAALGCLVKDYFPEPVTVSWNSGALTSGVHTFPAV |
| | LQSSGLYSLSSVVTVPSSSLGTKTYTCNVDHKPSNTKVDKRVESKYGPPCPS |
| | CPAPEFLGGPSVFLFPPKPKDTLMISRTPEVTCVVVDVSQEDPEVQFNWYV |
| | DGVEVHNAKTKPREEQFNSTYRVVSVLTVLHQDWLNGKEYKCKVSNKGL |
| | PSSIEKTISKAKGQPREPQVYTLPPSQEEMTKNQVSLTCLVKGFYPSDIAVE |
| | WESNGQPENNYKTTPPVLDSDGSFFLYSRLTVDKSRWQEGNVFSCSVMHE |
| | ALHNHYTQKSLSLSLGKGGGGSGGGGSGGGGSDTQEKEVRAMVGSDVEL |
| | SCACPEGSRFDLNDVYVYWQTSESKTVVTYHIPQNSSLENVDSRYRNRAL |
| | MSPAGMLRGDFSLRLFNVTPQDEQKFHCLVLSQSLGFQEVLSVEVTLHVA |
| | ANFSVPVVSAPHSPSQDELTFTCTSINGYPRPNVYWINKTDNSLLDQALQN |
| | DTVFLNMRGLYDVVSVLRIARTPSVNIGCCIENVLLQQNLTVGSQTGNDIG |
| | ERDKITENPVSTGEKNAATWS |
| SEQ ID NO: 642 | DTQEKEVRAMVGSDVELSCACPEGSRFDLNDVYVYWQTSESKTVVTYHIP |
| ICOSLecd-Fc- | QNSSLENVDSRYRNRALMSPAGMLRGDFSLRLFNVTPQDEQKFHCLVLSQ |
| VEGFRecd | SLGFQEVLSVEVTLHVAANFSVPVVSAPHSPSQDELTFTCTSINGYPRPNVY |
| | WINKTDNSLLDQALQNDTVFLNMRGLYDVVSVLRIARTPSVNIGCCIENVL |
| | LQQNLTVGSQTGNDIGERDKITENPVSTGEKNAATWSASTKGPSVFPLAPC |
| | SRSTSESTAALGCLVKDYFPEPVTVSWNSGALTSGVHTFPAVLQSSGLYSLS |
| | SVVTVPSSSLGTKTYTCNVDHKPSNTKVDKRVESKYGPPCPSCPAPEFLGG |
| | PSVFLFPPKPKDTLMISRTPEVTCVVVDVSQEDPEVQFNWYVDGVEVHNA |
| | KTKPREEQFNSTYRVVSVLTVLHQDWLNGKEYKCKVSNKGLPSSIEKTISK |
| | AKGQPREPQVYTLPPSQEEMTKNQVSLTCLVKGFYPSDIAVEWESNGQPEN |
| | NYKTTPPVLDSDGSFFLYSRLTVDKSRWQEGNVFSCSVMHEALHNHYTQK |
| | SLSLSLGKGGGGSGGGGSGGGGSSDTGRPFVEMYSEIPEIIHMTEGRELVIP |
| | CRVTSPNITVTLKKFPLDTLIPDGKRIIWDSRKGFIISNATYKEIGLLTCEATV |
| | NGHLYKTNYLTHRQTNTIIDVVLSPSHGIELSVGEKLVLNCTARTELNVGID |
| | FNWEYPSSKHQHKKLVNRDLKTQSGSEMKKFLSTLTIDGVTRSDQGLYTC |
| | AASSGLMTKKNSTFVRVHEK |
| SEQ ID NO: 643 | SDTGRPFVEMYSEIPEIIHMTEGRELVIPCRVTSPNITVTLKKFPLDTLIPDGK |
| VEGFRecd-Fc- | RIIWDSRKGFIISNATYKEIGLLTCEATVNGHLYKTNYLTHRQTNTIIDVVLS |
| LIGHTecd | PSHGIELSVGEKLVLNCTARTELNVGIDFNWEYPSSKHQHKKLVNRDLKTQ |
| | SGSEMKKFLSTLTIDGVTRSDQGLYTCAASSGLMTKKNSTFVRVHEKASTK |
| | GPSVFPLAPCSRSTSESTAALGCLVKDYFPEPVTVSWNSGALTSGVHTFPAV |
| | LQSSGLYSLSSVVTVPSSSLGTKTYTCNVDHKPSNTKVDKRVESKYGPPCPS |
| | CPAPEFLGGPSVFLFPPKPKDTLMISRTPEVTCVVVDVSQEDPEVQFNWYV |
| | DGVEVHNAKTKPREEQFNSTYRVVSVLTVLHQDWLNGKEYKCKVSNKGL |
| | PSSIEKTISKAKGQPREPQVYTLPPSQEEMTKNQVSLTCLVKGFYPSDIAVE |
| | WESNGQPENNYKTTPPVLDSDGSFFLYSRLTVDKSRWQEGNVFSCSVMHE |
| | ALHNHYTQKSLSLSLGKGGGGSGGGGSGGGGSDGPAGSWEQLIQERRSHE |
| | VNPAAHLTGANSSLTGSGGPLLWETQLGLAFLRGLSYHDGALVVTKAGYY |
| | YIYSKVQLGGVGCPLGLASTITHGLYKRTPRYPEELELLVSQQSPCGRATSS |
| | SRVWWDSSFLGGVVHLEAGEKVVVRVLDERLVRLRDGTRSYFGAFMV |
| SEQ ID NO: 644 | DGPAGSWEQLIQERRSHEVNPAAHLTGANSSLTGSGGPLLWETQLGLAFLR |
| LIGHTecd-Fc- | GLSYHDGALVVTKAGYYYIYSKVQLGGVGCPLGLASTITHGLYKRTPRYP |
| VEGFRecd | EELELLVSQQSPCGRATSSSRVWWDSSFLGGVVHLEAGEKVVVRVLDERL |
| | VRLRDGTRSYFGAFMVASTKGPSVFPLAPCSRSTSESTAALGCLVKDYFPEP |
| | VTVSWNSGALTSGVHTFPAVLQSSGLYSLSSVVTVPSSSLGTKTYTCNVDH |
| | KPSNTKVDKRVESKYGPPCPSCPAPEFLGGPSVFLFPPKPKDTLMISRTPEVT |
| | CVVVDVSQEDPEVQFNWYVDGVEVHNAKTKPREEQFNSTYRVVSVLTVL |
| | HQDWLNGKEYKCKVSNKGLPSSIEKTISKAKGQPREPQVYTLPPSQEEMTK |
| | NQVSLTCLVKGFYPSDIAVEWESNGQPENNYKTTPPVLDSDGSFFLYSRLT |
| | VDKSRWQEGNVFSCSVMHEALHNHYTQKSLSLSLGKGGGGSGGGGSGGG |
| | GSSDTGRPFVEMYSEIPEIIHMTEGRELVIPCRVTSPNITVTLKKFPLDTLIPD |
| | GKRIIWDSRKGFIISNATYKEIGLLTCEATVNGHLYKTNYLTHRQTNTIIDVV |
| | LSPSHGIELSVGEKLVLNCTARTELNVGIDFNWEYPSSKHQHKKLVNRDLK |
| | TQSGSEMKKFLSTLTIDGVTRSDQGLYTCAASSGLMTKKNSTFVRVHEK |
| SEQ ID NO: 645 | SDTGRPFVEMYSEIPEIIHMTEGRELVIPCRVTSPNITVTLKKFPLDTLIPDGK |
| VEGFRecd-Fc - | RIIWDSRKGFIISNATYKEIGLLTCEATVNGHLYKTNYLTHRQTNTIIDVVLS |
| OX40Lecd | PSHGIELSVGEKLVLNCTARTELNVGIDFNWEYPSSKHQHKKLVNRDLKTQ |
| | SGSEMKKFLSTLTIDGVTRSDQGLYTCAASSGLMTKKNSTFVRVHEKASTK |
| | GPSVFPLAPCSRSTSESTAALGCLVKDYFPEPVTVSWNSGALTSGVHTFPAV |
| | LQSSGLYSLSSVVTVPSSSLGTKTYTCNVDHKPSNTKVDKRVESKYGPPCPS |
| | CPAPEFLGGPSVFLFPPKPKDTLMISRTPEVTCVVVDVSQEDPEVQFNWYV |
| | DGVEVHNAKTKPREEQFNSTYRVVSVLTVLHQDWLNGKEYKCKVSNKGL |
| | PSSIEKTISKAKGQPREPQVYTLPPSQEEMTKNQVSLTCLVKGFYPSDIAVE |
| | WESNGQPENNYKTTPPVLDSDGSFFLYSRLTVDKSRWQEGNVFSCSVMHE |
| | ALHNHYTQKSLSLSLGKGGGGSGGGGSGGGGSQVSHRYPRIQSIKVQFTEY |
| | KKEKGFILTSQKEDEIMKVQNNSVIINCDGFYLISLKGYFSQEVNISLHYQK |
| | DEEPLFQLKKVRSVNSLMVASLTYKDKVYLNVTTDNTSLDDFHVNGGELI |
| | LIHQNPGEFCVL |
| SEQ ID NO: 646 | QVSHRYPRIQSIKVQFTEYKKEKGFILTSQKEDEIMKVQNNSVIINCDGFYLI |
| OX40Lecd-Fc- | SLKGYFSQEVNISLHYQKDEEPLFQLKKVRSVNSLMVASLTYKDKVYLNV |
| VEGFRecd | TTDNTSLDDFHVNGGELILIHQNPGEFCVLASTKGPSVFPLAPCSRSTSESTA |
| | ALGCLVKDYFPEPVTVSWNSGALTSGVHTFPAVLQSSGLYSLSSVVTVPSS |
| | SLGTKTYTCNVDHKPSNTKVDKRVESKYGPPCPSCPAPEFLGGPSVFLFPPK |
| | PKDTLMISRTPEVTCVVVDVSQEDPEVQFNWYVDGVEVHNAKTKPREEQF |
| | NSTYRVVSVLTVLHQDWLNGKEYKCKVSNKGLPSSIEKTISKAKGQPREPQ |
| | VYTLPPSQEEMTKNQVSLTCLVKGFYPSDIAVEWESNGQPENNYKTTPPVL |
| | DSDGSFFLYSRLTVDKSRWQEGNVFSCSVMHEALHNHYTQKSLSLSLGKG |
| | GGGSGGGGSGGGGSSDTGRPFVEMYSEIPEIIHMTEGRELVIPCRVTSPNITV |
| | TLKKFPLDTLIPDGKRIIWDSRKGFIISNATYKEIGLLTCEATVNGHLYKTNY |
| | LTHRQTNTIIDVVLSPSHGIELSVGEKLVLNCTARTELNVGIDFNWEYPSSK |
| | HQHKKLVNRDLKTQSGSEMKKFLSTLTIDGVTRSDQGLYTCAASSGLMTK |
| | KNSTFVRVHEK |
| SEQ ID NO: 647 | EVQLVESGGGLVQPGGSLRLSCAASGFTFSDSWIHWVRQAPGKGLEWVA |
| anti-PDL1 HC | WISPYGGSTYYADSVKGRFTISADTSKNTAYLQMNSLRAEDTAVYYCARR |
| fused to 41BBL | HWPGGFDYWGQGTLVTVSAASTKGPSVFPLAPSSKSTSGGTAALGCLVKD |
| ECD | YFPEPVTVSWNSGALTSGVHTFPAVLQSSGLYSLSSVVTVPSSSLGTQTYIC |
| | NVNHKPSNTKVDKKVEPKSCDKTHTCPPCPAPELLGGPSVFLFPPKPKDTL |
| | MISRTPEVTCVVVDVSHEDPEVKFNWYVDGVEVHNAKTKPREEQYASTYR |
| | VVSVLTVLHQDWLNGKEYKCKVSNKALPAPIEKTISKAKGQPREPQVYTLP |
| | PSREEMTKNQVSLTCLVKGFYPSDIAVEWESNGQPENNYKTTPPVLDSDGS |
| | FFLYSKLTVDKSRWQQGNVFSCSVMHEALHNHYTQKSLSLSPGKGGGGSG |
| | GGGSGGGGSACPWAVSGARASPGSAASPRLREGPELSPDDPAGLLDLRQG |
| | MFAQLVAQNVLLIDGPLSWYSDPGLAGVSLTGGLSYKEDTKELVVAKAGV |
| | YYVFFQLELRRVVAGEGSGSVSLALHLQPLRSAAGAAALALTVDLPPASSE |
| | ARNSAFGFQGRLLHLSAGQRLGVHLHTEARARHAWQLTQGATVLGLFRV |
| | TPEIPAGLPSPRSE |
| SEQ ID NO: 648 | EVQLVESGGGLVQPGGSLRLSCAASGFTFSDSWIHWVRQAPGKGLEWVA |
| anti-PDL1 HC | WISPYGGSTYYADSVKGRFTISADTSKNTAYLQMNSLRAEDTAVYYCARR |
| fused to CD30L | HWPGGFDYWGQGTLVTVSAASTKGPSVFPLAPSSKSTSGGTAALGCLVKD |
| ECD | YFPEPVTVSWNSGALTSGVHTFPAVLQSSGLYSLSSVVTVPSSSLGTQTYIC |
| | NVNHKPSNTKVDKKVEPKSCDKTHTCPPCPAPELLGGPSVFLFPPKPKDTL |
| | MISRTPEVTCVVVDVSHEDPEVKFNWYVDGVEVHNAKTKPREEQYASTYR |
| | VVSVLTVLHQDWLNGKEYKCKVSNKALPAPIEKTISKAKGQPREPQVYTLP |
| | PSREEMTKNQVSLTCLVKGFYPSDIAVEWESNGQPENNYKTTPPVLDSDGS |
| | FFLYSKLTVDKSRWQQGNVFSCSVMHEALHNHYTQKSLSLSPGKGGGGSG |
| | GGGSGGGGSQRTDSIPNSPDNVPLKGGNCSEDLLCILKRAPFKKSWAYLQV |
| | AKHLNKTKLSWNKDGILHGVRYQDGNLVIQFPGLYFIICQLQFLVQCPNNS |
| | VDLKLELLINKHIKKQALVTVCESGMQTKHVYQNLSQFLLDYLQVNTTISV |
| | NVDTFQYIDTSTFPLENVLSIFLYSNSD |
| SEQ ID NO: 649 | EVQLVESGGGLVQPGGSLRLSCAASGFTFSDSWIHWVRQAPGKGLEWVA |
| anti-PDL1 HC | WISPYGGSTYYADSVKGRFTISADTSKNTAYLQMNSLRAEDTAVYYCARR |
| fused to CD40L | HWPGGFDYWGQGTLVTVSAASTKGPSVFPLAPSSKSTSGGTAALGCLVKD |
| ECD | YFPEPVTVSWNSGALTSGVHTFPAVLQSSGLYSLSSVVTVPSSSLGTQTYIC |
| | NVNHKPSNTKVDKKVEPKSCDKTHTCPPCPAPELLGGPSVFLFPPKPKDTL |
| | MISRTPEVTCVVVDVSHEDPEVKFNWYVDGVEVHNAKTKPREEQYASTYR |
| | VVSVLTVLHQDWLNGKEYKCKVSNKALPAPIEKTISKAKGQPREPQVYTLP |
| | PSREEMTKNQVSLTCLVKGFYPSDIAVEWESNGQPENNYKTTPPVLDSDGS |
| | FFLYSKLTVDKSRWQQGNVFSCSVMHEALHNHYTQKSLSLSPGKGGGGSG |
| | GGGSGGGGSGDQNPQIAAHVISEASSKTTSVLQWAEKGYYTMSNNLVTLE |
| | NGKQLTVKRQGLYYIYAQVTFCSNREASSQAPFIASLCLKSPGRFERILLRA |
| | ANTHSSAKPCGQQSIHLGGVFELQPGASVFVNVTDPSQVSHGTGFTSFGLL |
| | KL |
| SEQ ID NO: 650 | EVQLVESGGGLVQPGGSLRLSCAASGFTFSDSWIHWVRQAPGKGLEWVA |
| anti-PDL1 HC | WISPYGGSTYYADSVKGRFTISADTSKNTAYLQMNSLRAEDTAVYYCARR |
| fused to CD70 | HWPGGFDYWGQGTLVTVSAASTKGPSVFPLAPSSKSTSGGTAALGCLVKD |
| ECD | YFPEPVTVSWNSGALTSGVHTFPAVLQSSGLYSLSSVVTVPSSSLGTQTYIC |
| | NVNHKPSNTKVDKKVEPKSCDKTHTCPPCPAPELLGGPSVFLFPPKPKDTL |
| | MISRTPEVTCVVVDVSHEDPEVKFNWYVDGVEVHNAKTKPREEQYASTYR |
| | VVSVLTVLHQDWLNGKEYKCKVSNKALPAPIEKTISKAKGQPREPQVYTLP |
| | PSREEMTKNQVSLTCLVKGFYPSDIAVEWESNGQPENNYKTTPPVLDSDGS |
| | FFLYSKLTVDKSRWQQGNVFSCSVMHEALHNHYTQKSLSLSPGKGGGGSG |
| | GGGSGGGGSQRFAQAQQQLPLESLGWDVAELQLNHTGPQQDPRLYWQGG |
| | PALGRSFLHGPELDKGQLRIHRDGIYMVHIQVTLAICSSTTASRHHPTTLAV |
| | GICSPASRSISLLRLSFHQGCTIASQRLTPLARGDTLCTNLTGTLLPSRNTDET |
| | FFGVQWVRP |
| SEQ ID NO: 651 | EVQLVESGGGLVQPGGSLRLSCAASGFTFSDSWIHWVRQAPGKGLEWVA |
| anti-PDL1 HC | WISPYGGSTYYADSVKGRFTISADTSKNTAYLQMNSLRAEDTAVYYCARR |
| fused to GITRL | HWPGGFDYWGQGTLVTVSAASTKGPSVFPLAPSSKSTSGGTAALGCLVKD |
| ECD | YFPEPVTVSWNSGALTSGVHTFPAVLQSSGLYSLSSVVTVPSSSLGTQTYIC |
| | NVNHKPSNTKVDKKVEPKSCDKTHTCPPCPAPELLGGPSVFLFPPKPKDTL |
| | MISRTPEVTCVVVDVSHEDPEVKFNWYVDGVEVHNAKTKPREEQYASTYR |
| | VVSVLTVLHQDWLNGKEYKCKVSNKALPAPIEKTISKAKGQPREPQVYTLP |
| | PSREEMTKNQVSLTCLVKGFYPSDIAVEWESNGQPENNYKTTPPVLDSDGS |
| | FFLYSKLTVDKSRWQQGNVFSCSVMHEALHNHYTQKSLSLSPGKGGGGSG |
| | GGGSGGGGSQLETAKEPCMAKFGPLPSKWQMASSEPPCVNKVSDWKLEIL |
| | QNGLYLIYGQVAPNANYNDVAPFEVRLYKNKDMIQTLTNKSKIQNVGGTY |
| | ELHVGDTIDLIFNSEHQVLKNNTYWGIILLANPQFIS |
| SEQ ID NO: 652 | EVQLVESGGGLVQPGGSLRLSCAASGFTFSDSWIHWVRQAPGKGLEWVA |
| anti-PDL1 HC | WISPYGGSTYYADSVKGRFTISADTSKNTAYLQMNSLRAEDTAVYYCARR |
| fused to ICOSL | HWPGGFDYWGQGTLVTVSAASTKGPSVFPLAPSSKSTSGGTAALGCLVKD |
| ECD | YFPEPVTVSWNSGALTSGVHTFPAVLQSSGLYSLSSVVTVPSSSLGTQTYIC |
| | NVNHKPSNTKVDKKVEPKSCDKTHTCPPCPAPELLGGPSVFLFPPKPKDTL |
| | MISRTPEVTCVVVDVSHEDPEVKFNWYVDGVEVHNAKTKPREEQYASTYR |
| | VVSVLTVLHQDWLNGKEYKCKVSNKALPAPIEKTISKAKGQPREPQVYTLP |
| | PSREEMTKNQVSLTCLVKGFYPSDIAVEWESNGQPENNYKTTPPVLDSDGS |
| | FFLYSKLTVDKSRWQQGNVFSCSVMHEALHNHYTQKSLSLSPGKGGGGSG |
| | GGGSGGGGSDTQEKEVRAMVGSDVELSCACPEGSRFDLNDVYVYWQTSE |
| | SKTVVTYHIPQNSSLENVDSRYRNRALMSPAGMLRGDFSLRLFNVTPQDEQ |
| | KFHCLVLSQSLGFQEVLSVEVTLHVAANFSVPVVSAPHSPSQDELTFTCTSI |
| | NGYPRPNVYWINKTDNSLLDQALQNDTVFLNMRGLYDVVSVLRIARTPSV |
| | NIGCCIENVLLQQNLTVGSQTGNDIGERDKITENPVSTGEKNAATWS |
| SEQ ID NO: 653 | EVQLVESGGGLVQPGGSLRLSCAASGFTFSDSWIHWVRQAPGKGLEWVA |
| anti-PDL1 HC | WISPYGGSTYYADSVKGRFTISADTSKNTAYLQMNSLRAEDTAVYYCARR |
| fused to IL12 | HWPGGFDYWGQGTLVTVSAASTKGPSVFPLAPSSKSTSGGTAALGCLVKD |
| ECD | YFPEPVTVSWNSGALTSGVHTFPAVLQSSGLYSLSSVVTVPSSSLGTQTYIC |
| | NVNHKPSNTKVDKKVEPKSCDKTHTCPPCPAPELLGGPSVFLFPPKPKDTL |
| | MISRTPEVTCVVVDVSHEDPEVKFNWYVDGVEVHNAKTKPREEQYASTYR |
| | VVSVLTVLHQDWLNGKEYKCKVSNKALPAPIEKTISKAKGQPREPQVYTLP |
| | PSREEMTKNQVSLTCLVKGFYPSDIAVEWESNGQPENNYKTTPPVLDSDGS |
| | FFLYSKLTVDKSRWQQGNVFSCSVMHEALHNHYTQKSLSLSPGKGGGGSG |
| | GGGSGGGGSIWELKKDVYVVELDWYPDAPGEMVVLTCDTPEEDGITWTL |
| | DQSSEVLGSGKTLTIQVKEFGDAGQYTCHKGGEVLSHSLLLLHKKEDGIWS |
| | TDILKDQKEPKNKTFLRCEAKNYSGRFTCWWLTTISTDLTFSVKSSRGSSDP |
| | QGVTCGAATLSAERVRGDNKEYEYSVECQEDSACPAAEESLPIEVMVDAV |
| | HKLKYENYTSSFFIRDIIKPDPPKNLQLKPLKNSRQVEVSWEYPDTWSTPHS |
| | YFSLTFCVQVQGKSKREKKDRVFTDKTSATVICRKNASISVRAQDRYYSSS |
| | WSEWASVPCSGGGGSGGGGSGGGGSRNLPVATPDPGMFPCLHHSQNLLR |
| | AVSNMLQKARQTLEFYPCTSEEIDHEDITKDKTSTVEACLPLELTKNESCLN |
| | SRETSFITNGSCLASRKTSFMMALCLSSIYEDLKMYQVEFKTMNAKLLMDP |
| | KRQIFLDQNMLAVIDELMQALNFNSETVPQKSSLEEPDFYKTKIKLCILLHA |
| | FRIRAVTIDRVMSYLNAS |
| SEQ ID NO: 654 | EVQLVESGGGLVQPGGSLRLSCAASGFTFSDSWIHWVRQAPGKGLEWVA |
| anti-PDL1 HC | WISPYGGSTYYADSVKGRFTISADTSKNTAYLQMNSLRAEDTAVYYCARR |
| fused to IL15 | HWPGGFDYWGQGTLVTVSAASTKGPSVFPLAPSSKSTSGGTAALGCLVKD |
| ECD | YFPEPVTVSWNSGALTSGVHTFPAVLQSSGLYSLSSVVTVPSSSLGTQTYIC |
| | NVNHKPSNTKVDKKVEPKSCDKTHTCPPCPAPELLGGPSVFLFPPKPKDTL |
| | MISRTPEVTCVVVDVSHEDPEVKFNWYVDGVEVHNAKTKPREEQYASTYR |
| | VVSVLTVLHQDWLNGKEYKCKVSNKALPAPIEKTISKAKGQPREPQVYTLP |
| | PSREEMTKNQVSLTCLVKGFYPSDIAVEWESNGQPENNYKTTPPVLDSDGS |
| | FFLYSKLTVDKSRWQQGNVFSCSVMHEALHNHYTQKSLSLSPGKGGGGSG |
| | GGGSGGGGSNWVNVISDLKKIEDLIQSMHIDATLYTESDVHPSCKVTAMK |
| | CFLLELQVISLESGDASIHDTVENLIILANNSLSSNGNVTESGCKECEELEEK |
| | NIKEFLQSFVHIVQMFINTS |
| SEQ ID NO: 655 | EVQLVESGGGLVQPGGSLRLSCAASGFTFSDSWIHWVRQAPGKGLEWVA |
| anti-PDL1 HC | WISPYGGSTYYADSVKGRFTISADTSKNTAYLQMNSLRAEDTAVYYCARR |
| fused to LIGHT | HWPGGFDYWGQGTLVTVSAASTKGPSVFPLAPSSKSTSGGTAALGCLVKD |
| ECD | YFPEPVTVSWNSGALTSGVHTFPAVLQSSGLYSLSSVVTVPSSSLGTQTYIC |
| | NVNHKPSNTKVDKKVEPKSCDKTHTCPPCPAPELLGGPSVFLFPPKPKDTL |
| | MISRTPEVTCVVVDVSHEDPEVKFNWYVDGVEVHNAKTKPREEQYASTYR |
| | VVSVLTVLHQDWLNGKEYKCKVSNKALPAPIEKTISKAKGQPREPQVYTLP |
| | PSREEMTKNQVSLTCLVKGFYPSDIAVEWESNGQPENNYKTTPPVLDSDGS |
| | FFLYSKLTVDKSRWQQGNVFSCSVMHEALHNHYTQKSLSLSPGKGGGGSG |
| | GGGSGGGGSDGPAGSWEQLIQERRSHEVNPAAHLTGANSSLTGSGGPLLW |
| | ETQLGLAFLRGLSYHDGALVVTKAGYYYIYSKVQLGGVGCPLGLASTITH |
| | GLYKRTPRYPEELELLVSQQSPCGRATSSSRVWWDSSFLGGVVHLEAGEK |
| | VVVRVLDERLVRLRDGTRSYFGAFMV |
| SEQ ID NO: 656 | EVQLVESGGGLVQPGGSLRLSCAASGFTFSDSWIHWVRQAPGKGLEWVA |
| anti-PDL1 HC | WISPYGGSTYYADSVKGRFTISADTSKNTAYLQMNSLRAEDTAVYYCARR |
| fused to OX40L | HWPGGFDYWGQGTLVTVSAASTKGPSVFPLAPSSKSTSGGTAALGCLVKD |
| ECD | YFPEPVTVSWNSGALTSGVHTFPAVLQSSGLYSLSSVVTVPSSSLGTQTYIC |
| | NVNHKPSNTKVDKKVEPKSCDKTHTCPPCPAPELLGGPSVFLFPPKPKDTL |
| | MISRTPEVTCVVVDVSHEDPEVKFNWYVDGVEVHNAKTKPREEQYASTYR |
| | VVSVLTVLHQDWLNGKEYKCKVSNKALPAPIEKTISKAKGQPREPQVYTLP |
| | PSREEMTKNQVSLTCLVKGFYPSDIAVEWESNGQPENNYKTTPPVLDSDGS |
| | FFLYSKLTVDKSRWQQGNVFSCSVMHEALHNHYTQKSLSLSPGKGGGGSG |
| | GGGSGGGGSQVSHRYPRIQSIKVQFTEYKKEKGFILTSQKEDEIMKVQNNS |
| | VIINCDGFYLISLKGYFSQEVNISLHYQKDEEPLFQLKKVRSVNSLMVASLT |
| | YKDKVYLNVTTDNTSLDDFHVNGGELILIHQNPGEFCVL |
| SEQ ID NO: 657 | DIQMTQSPSSLSASVGDRVTITCRASQDVSTAVAWYQQKPGKAPKLLIYSA |
| anti-PDL1 LC | SFLYSGVPSRFSGSGSGTDFTLTISSLQPEDFATYYCQQYLYHPATFGQGTK |
| fused to 41BBL | VEIKRTVAAPSVFIFPPSDEQLKSGTASVVCLLNNFYPREAKVQWKVDNAL |
| ECD | QSGNSQESVTEQDSKDSTYSLSSTLTLSKADYEKHKVYACEVTHQGLSSPV |
| | TKSFNRGECGGGGSGGGGSGGGGSACPWAVSGARASPGSAASPRLREGPE |
| | LSPDDPAGLLDLRQGMFAQLVAQNVLLIDGPLSWYSDPGLAGVSLTGGLS |
| | YKEDTKELVVAKAGVYYVFFQLELRRVVAGEGSGSVSLALHLQPLRSAAG |
| | AAALALTVDLPPASSEARNSAFGFQGRLLHLSAGQRLGVHLHTEARARHA |
| | WQLTQGATVLGLFRVTPEIPAGLPSPRSE |
| SEQ ID NO: 658 | DIQMTQSPSSLSASVGDRVTITCRASQDVSTAVAWYQQKPGKAPKLLIYSA |
| anti-PDL1 LC | SFLYSGVPSRFSGSGSGTDFTLTISSLQPEDFATYYCQQYLYHPATFGQGTK |
| fused to CD30L | VEIKRTVAAPSVFIFPPSDEQLKSGTASVVCLLNNFYPREAKVQWKVDNAL |
| ECD | QSGNSQESVTEQDSKDSTYSLSSTLTLSKADYEKHKVYACEVTHQGLSSPV |
| | TKSFNRGECGGGGSGGGGSGGGGSQRTDSIPNSPDNVPLKGGNCSEDLLCI |
| | LKRAPFKKSWAYLQVAKHLNKTKLSWNKDGILHGVRYQDGNLVIQFPGL |
| | YFIICQLQFLVQCPNNSVDLKLELLINKHIKKQALVTVCESGMQTKHVYQN |
| | LSQFLLDYLQVNTTISVNVDTFQYIDTSTFPLENVLSIFLYSNSD |
| SEQ ID NO: 659 | DIQMTQSPSSLSASVGDRVTITCRASQDVSTAVAWYQQKPGKAPKLLIYSA |
| anti-PDL1 LC | SFLYSGVPSRFSGSGSGTDFTLTISSLQPEDFATYYCQQYLYHPATFGQGTK |
| fused to CD40L | VEIKRTVAAPSVFIFPPSDEQLKSGTASVVCLLNNFYPREAKVQWKVDNAL |
| ECD | QSGNSQESVTEQDSKDSTYSLSSTLTLSKADYEKHKVYACEVTHQGLSSPV |
| | TKSFNRGECGGGGSGGGGSGGGGSGDQNPQIAAHVISEASSKTTSVLQWA |
| | EKGYYTMSNNLVTLENGKQLTVKRQGLYYIYAQVTFCSNREASSQAPFIAS |
| | LCLKSPGRFERILLRAANTHSSAKPCGQQSIHLGGVFELQPGASVFVNVTDP |
| | SQVSHGTGFTSFGLLKL |
| SEQ ID NO: 660 | DIQMTQSPSSLSASVGDRVTITCRASQDVSTAVAWYQQKPGKAPKLLIYSA |
| anti-PDL1 LC | SFLYSGVPSRFSGSGSGTDFTLTISSLQPEDFATYYCQQYLYHPATFGQGTK |
| fused to CD70 | VEIKRTVAAPSVFIFPPSDEQLKSGTASVVCLLNNFYPREAKVQWKVDNAL |
| ECD | QSGNSQESVTEQDSKDSTYSLSSTLTLSKADYEKHKVYACEVTHQGLSSPV |
| | TKSFNRGECGGGGSGGGGSGGGGSQRFAQAQQQLPLESLGWDVAELQLN |
| | HTGPQQDPRLYWQGGPALGRSFLHGPELDKGQLRIHRDGIYMVHIQVTLAI |
| | CSSTTASRHHPTTLAVGICSPASRSISLLRLSFHQGCTIASQRLTPLARGDTLC |
| | TNLTGTLLPSRNTDETFFGVQWVRP |
| SEQ ID NO: 661 | DIQMTQSPSSLSASVGDRVTITCRASQDVSTAVAWYQQKPGKAPKLLIYSA |
| anti-PDL1 LC | SFLYSGVPSRFSGSGSGTDFTLTISSLQPEDFATYYCQQYLYHPATFGQGTK |
| fused to GITRL | VEIKRTVAAPSVFIFPPSDEQLKSGTASVVCLLNNFYPREAKVQWKVDNAL |
| ECD | QSGNSQESVTEQDSKDSTYSLSSTLTLSKADYEKHKVYACEVTHQGLSSPV |
| | TKSFNRGECGGGGSGGGGSGGGGSQLETAKEPCMAKFGPLPSKWQMASSE |
| | PPCVNKVSDWKLEILQNGLYLIYGQVAPNANYNDVAPFEVRLYKNKDMIQ |
| | TLTNKSKIQNVGGTYELHVGDTIDLIFNSEHQVLKNNTYWGIILLANPQFIS |
| SEQ ID NO: 662 | DIQMTQSPSSLSASVGDRVTITCRASQDVSTAVAWYQQKPGKAPKLLIYSA |
| anti-PDL1 LC | SFLYSGVPSRFSGSGSGTDFTLTISSLQPEDFATYYCQQYLYHPATFGQGTK |
| fused to ICOSL | VEIKRTVAAPSVFIFPPSDEQLKSGTASVVCLLNNFYPREAKVQWKVDNAL |
| ECD | QSGNSQESVTEQDSKDSTYSLSSTLTLSKADYEKHKVYACEVTHQGLSSPV |
| | TKSFNRGECGGGGSGGGGSGGGGSDTQEKEVRAMVGSDVELSCACPEGSR |
| | FDLNDVYVYWQTSESKTVVTYHIPQNSSLENVDSRYRNRALMSPAGMLRG |
| | DFSLRLFNVTPQDEQKFHCLVLSQSLGFQEVLSVEVTLHVAANFSVPVVSA |
| | PHSPSQDELTFTCTSINGYPRPNVYWINKTDNSLLDQALQNDTVFLNMRGL |
| | YDVVSVLRIARTPSVNIGCCIENVLLQQNLTVGSQTGNDIGERDKITENPVS |
| | TGEKNAATWS |
| SEQ ID NO: 663 | DIQMTQSPSSLSASVGDRVTITCRASQDVSTAVAWYQQKPGKAPKLLIYSA |
| anti-PDL1 LC | SFLYSGVPSRFSGSGSGTDFTLTISSLQPEDFATYYCQQYLYHPATFGQGTK |
| fused to IL12 | VEIKRTVAAPSVFIFPPSDEQLKSGTASVVCLLNNFYPREAKVQWKVDNAL |
| ECD | QSGNSQESVTEQDSKDSTYSLSSTLTLSKADYEKHKVYACEVTHQGLSSPV |
| | TKSFNRGECGGGGSGGGGSGGGGSIWELKKDVYVVELDWYPDAPGEMVV |
| | LTCDTPEEDGITWTLDQSSEVLGSGKTLTIQVKEFGDAGQYTCHKGGEVLS |
| | HSLLLLHKKEDGIWSTDILKDQKEPKNKTFLRCEAKNYSGRFTCWWLTTIS |
| | TDLTFSVKSSRGSSDPQGVTCGAATLSAERVRGDNKEYEYSVECQEDSACP |
| | AAEESLPIEVMVDAVHKLKYENYTSSFFIRDIIKPDPPKNLQLKPLKNSRQV |
| | EVSWEYPDTWSTPHSYFSLTFCVQVQGKSKREKKDRVFTDKTSATVICRK |
| | NASISVRAQDRYYSSSWSEWASVPCSGGGGSGGGGSGGGGSRNLPVATPD |
| | PGMFPCLHHSQNLLRAVSNMLQKARQTLEFYPCTSEEIDHEDITKDKTSTV |
| | EACLPLELTKNESCLNSRETSFITNGSCLASRKTSFMMALCLSSIYEDLKMY |
| | QVEFKTMNAKLLMDPKRQIFLDQNMLAV1DELMQALNFNSETVPQKSSLE |
| | EPDFYKTKIKLCILLHAFRIRAVTIDRVMSYLNAS |
| SEQ ID NO: 664 | DIQMTQSPSSLSASVGDRVTITCRASQDVSTAVAWYQQKPGKAPKLLIYSA |
| anti-PDL1 LC | SFLYSGVPSRFSGSGSGTDFTLTISSLQPEDFATYYCQQYLYHPATFGQGTK |
| fused to IL15 | VEIKRTVAAPSVFIFPPSDEQLKSGTASVVCLLNNFYPREAKVQWKVDNAL |
| ECD | QSGNSQESVTEQDSKDSTYSLSSTLTLSKADYEKHKVYACEVTHQGLSSPV |
| | TKSFNRGECGGGGSGGGGSGGGGSNWVNVISDLKKIEDLIQSMHIDATLYT |
| | ESDVHPSCKVTAMKCFLLELQVISLESGDASIHDTVENLIILANNSLSSNGN |
| | VTESGCKECEELEEKNIKEFLQSFVHIVQMFINTS |
| SEQ ID NO: 665 | DIQMTQSPSSLSASVGDRVTITCRASQDVSTAVAWYQQKPGKAPKLLIYSA |
| anti-PDL1 LC | SFLYSGVPSRFSGSGSGTDFTLTISSLQPEDFATYYCQQYLYHPATFGQGTK |
| fused to LIGHT | VEIKRTVAAPSVFIFPPSDEQLKSGTASVVCLLNNFYPREAKVQWKVDNAL |
| ECD | QSGNSQESVTEQDSKDSTYSLSSTLTLSKADYEKHKVYACEVTHQGLSSPV |
| | TKSFNRGECGGGGSGGGGSGGGGSDGPAGSWEQLIQERRSHEVNPAAHLT |
| | GANSSLTGSGGPLLWETQLGLAFLRGLSYHDGALVVTKAGYYYIYSKVQL |
| | GGVGCPLGLASTITHGLYKRTPRYPEELELLVSQQSPCGRATSSSRVWWDS |
| | SFLGGVVHLEAGEKVVVRVLDERLVRLRDGTRSYFGAFMV |
| SEQ ID NO: 666 | DIQMTQSPSSLSASVGDRVTITCRASQDVSTAVAWYQQKPGKAPKLLIYSA |
| anti-PDL1 LC | SFLYSGVPSRFSGSGSGTDFTLTISSLQPEDFATYYCQQYLYHPATFGQGTK |
| fused to OX40L | VEIKRTVAAPSVFIFPPSDEQLKSGTASVVCLLNNFYPREAKVQWKVDNAL |
| ECD | QSGNSQESVTEQDSKDSTYSLSSTLTLSKADYEKHKVYACEVTHQGLSSPV |
| | TKSFNRGECGGGGSGGGGSGGGGSQVSHRYPRIQSIKVQFTEYKKEKGFIL |
| | TSQKEDEIMKVQNNSVIINCDGFYLISLKGYFSQEVNISLHYQKDEEPLFQL |
| | KKVRSVNSLMVASLTYKDKVYLNVTTDNTSLDDFHVNGGELILIHQNPGE |
| | FCVL |
| SEQ ID NO: 667 | QVQLKQSGPGLVQPSQSLSITCTVSGFSLTNYGVHWVRQSPGKGLEWLGVI |
| anti-EGFR HC | WSGGNTDYNTPFTSRLSINKDNSKSQVFFKMNSLQSNDTAIYYCARALTYY |
| fused to 41BBL | DYEFAYWGQGTLVTVSAASTKGPSVFPLAPSSKSTSGGTAALGCLVKDYFP |
| ECD | EPVTVSWNSGALTSGVHTFYAVLQSSGLYSLSSVVTVPSSSLGTQTYICNVN |
| | HKPSNTKVDKRVEPKSCDKTHTCPPCPAPELLGGPSVFLFPPKPKDTLMISR |
| | TPEVTCVVVDVSHEDPEVKFNWYVDGVEVHNAKTKPREEQYNSTYRVVS |
| | VLTVLHQDWLNGKEYKCKVSNKALPAPIEKTISKAKGQPREPQVYTLPPSR |
| | DELTKNQVSLTCLVKGFYPSDIAVEWESNGQPENNYKTTPPVLDSDGSFFL |
| | YSKLTVDKSRWQQGNVFSCSVMHEALHNHYTQKSLSLSPGKGGGGSGGG |
| | GSGGGGSACPWAVSGARASPGSAASPRLREGPELSPDDPAGLLDLRQGMF |
| | AQLVAQNVLLIDGPLSWYSDPGLAGVSLTGGLSYKEDTKELVVAKAGVYY |
| | VFFQLELRRVVAGEGSGSVSLALHLQPLRSAAGAAALALTVDLPPASSEAR |
| | NSAFGFQGRLLHLSAGQRLGVHLHTEARARHAWQLTQGATVLGLFRVTPE |
| | IPAGLPSPRSE |
| SEQ ID NO: 668 | QVQLKQSGPGLVQPSQSLSITCTVSGFSLTNYGVHWVRQSPGKGLEWLGVI |
| anti-EGFR HC | WSGGNTDYNTPFTSRLSINKDNSKSQVFFKMNSLQSNDTAIYYCARALTYY |
| fused to CD30L | DYEFAYWGQGTLVTVSAASTKGPSVFPLAPSSKSTSGGTAALGCLVKDYFP |
| ECD | EPVTVSWNSGALTSGVHTFYAVLQSSGLYSLSSVVTVPSSSLGTQTYICNVN |
| | HKPSNTKVDKRVEPKSCDKTHTCPPCPAPELLGGPSVFLFPPKPKDTLMISR |
| | TPEVTCVVVDVSHEDPEVKFNWYVDGVEVHNAKTKPREEQYNSTYRVVS |
| | VLTVLHQDWLNGKEYKCKVSNKALPAPIEKTISKAKGQPREPQVYTLPPSR |
| | DELTKNQVSLTCLVKGFYPSDIAVEWESNGQPENNYKTTPPVLDSDGSFFL |
| | YSKLTVDKSRWQQGNVFSCSVMHEALHNHYTQKSLSLSPGKGGGGSGGG |
| | GSGGGGSQRTDSIPNSPDNVPLKGGNCSEDLLCILKRAPFKKSWAYLQVAK |
| | HLNKTKLSWNKDGILHGVRYQDGNLVIQFPGLYFIICQLQFLVQCPNNSVD |
| | LKLELLINKHIKKQALVTVCESGMQTKHVYQNLSQFLLDYLQVNTTISVNV |
| | DTFQYIDTSTFPLENVLSIFLYSNSD |
| SEQ ID NO: 669 | QVQLKQSGPGLVQPSQSLSITCTVSGFSLTNYGVHWVRQSPGKGLEWLGVI |
| anti-EGFR HC | WSGGNTDYNTPFTSRLSINKDNSKSQVFFKMNSLQSNDTAIYYCARALTYY |
| fused to CD40L | DYEFAYWGQGTLVTVSAASTKGPSVFPLAPSSKSTSGGTAALGCLVKDYFP |
| ECD | EPVTVSWNSGALTSGVHTFYAVLQSSGLYSLSSVVTVPSSSLGTQTYICNVN |
| | HKPSNTKVDKRVEPKSCDKTHTCPPCPAPELLGGPSVFLFPPKPKDTLMISR |
| | TPEVTCVVVDVSHEDPEVKFNWYVDGVEVHNAKTKPREEQYNSTYRVVS |
| | VLTVLHQDWLNGKEYKCKVSNKALPAPIEKTISKAKGQPREPQVYTLPPSR |
| | DELTKNQVSLTCLVKGFYPSDIAVEWESNGQPENNYKTTPPVLDSDGSFFL |
| | YSKLTVDKSRWQQGNVFSCSVMHEALHNHYTQKSLSLSPGKGGGGSGGG |
| | GSGGGGSGDQNPQIAAHVISEASSKTTSVLQWAEKGYYTMSNNLVTLENG |
| | KQLTVKRQGLYYIYAQVTFCSNREASSQAPFIASLCLKSPGRFERILLRAAN |
| | THSSAKPCGQQSIHLGGVFELQPGASVFVNVTDPSQVSHGTGFTSFGLLKL |
| SEQ ID NO: 670 | QVQLKQSGPGLVQPSQSLSITCTVSGFSLTNYGVHWVRQSPGKGLEWLGVI |
| anti-EGFR HC | WSGGNTDYNTPFTSRLSINKDNSKSQVFFKMNSLQSNDTAIYYCARALTYY |
| fused to CD70 | DYEFAYWGQGTLVTVSAASTKGPSVFPLAPSSKSTSGGTAALGCLVKDYFP |
| ECD | EPVTVSWNSGALTSGVHTFYAVLQSSGLYSLSSVVTVPSSSLGTQTYICNVN |
| | HKPSNTKVDKRVEPKSCDKTHTCPPCPAPELLGGPSVFLFPPKPKDTLMISR |
| | TPEVTCVVVDVSHEDPEVKFNWYVDGVEVHNAKTKPREEQYNSTYRVVS |
| | VLTVLHQDWLNGKEYKCKVSNKALPAPIEKTISKAKGQPREPQVYTLPPSR |
| | DELTKNQVSLTCLVKGFYPSDIAVEWESNGQPENNYKTTPPVLDSDGSFFL |
| | YSKLTVDKSRWQQGNVFSCSVMHEALHNHYTQKSLSLSPGKGGGGSGGG |
| | GSGGGGSQRFAQAQQQLPLESLGWDVAELQLNHTGPQQDPRLYWQGGPA |
| | LGRSFLHGPELDKGQLRIHRDGIYMVHIQVTLAICSSTTASRHHPTTLAVGI |
| | CSPASRSISLLRLSFHQGCTIASQRLTPLARGDTLCTNLTGTLLPSRNTDETFF |
| | GVQWVRP |
| SEQ ID NO: 671 | QVQLKQSGPGLVQPSQSLSITCTVSGFSLTNYGVHWVRQSPGKGLEWLGVI |
| anti-EGFR HC | WSGGNTDYNTPFTSRLSINKDNSKSQVFFKMNSLQSNDTAIYYCARALTYY |
| fused to GITRL | DYEFAYWGQGTLVTVSAASTKGPSVFPLAPSSKSTSGGTAALGCLVKDYFP |
| ECD | EPVTVSWNSGALTSGVHTFYAVLQSSGLYSLSSVVTVPSSSLGTQTYICNVN |
| | HKPSNTKVDKRVEPKSCDKTHTCPPCPAPELLGGPSVFLFPPKPKDTLMISR |
| | TPEVTCVVVDVSHEDPEVKFNWYVDGVEVHNAKTKPREEQYNSTYRVVS |
| | VLTVLHQDWLNGKEYKCKVSNKALPAPIEKTISKAKGQPREPQVYTLPPSR |
| | DELTKNQVSLTCLVKGFYPSDIAVEWESNGQPENNYKTTPPVLDSDGSFFL |
| | YSKLTVDKSRWQQGNVFSCSVMHEALHNHYTQKSLSLSPGKGGGGSGGG |
| | GSGGGGSQLETAKEPCMAKFGPLPSKWQMASSEPPCVNKVSDWKLEILQN |
| | GLYLIYGQVAPNANYNDVAPFEVRLYKNKDMIQTLTNKSKIQNVGGTYEL |
| | HVGDTIDLIFNSEHQVLKNNTYWGIILLANPQFIS |
| SEQ ID NO: 672 | QVQLKQSGPGLVQPSQSLSITCTVSGFSLTNYGVHWVRQSPGKGLEWLGVI |
| anti-EGFR HC | WSGGNTDYNTPFTSRLSINKDNSKSQVFFKMNSLQSNDTAIYYCARALTYY |
| fused to ICOSL | DYEFAYWGQGTLVTVSAASTKGPSVFPLAPSSKSTSGGTAALGCLVKDYFP |
| ECD | EPVTVSWNSGALTSGVHTFYAVLQSSGLYSLSSVVTVPSSSLGTQTYICNVN |
| | HKPSNTKVDKRVEPKSCDKTHTCPPCPAPELLGGPSVFLFPPKPKDTLMISR |
| | TPEVTCVVVDVSHEDPEVKFNWYVDGVEVHNAKTKPREEQYNSTYRVVS |
| | VLTVLHQDWLNGKEYKCKVSNKALPAPIEKTISKAKGQPREPQVYTLPPSR |
| | DELTKNQVSLTCLVKGFYPSDIAVEWESNGQPENNYKTTPPVLDSDGSFFL |
| | YSKLTVDKSRWQQGNVFSCSVMHEALHNHYTQKSLSLSPGKGGGGSGGG |
| | GSGGGGSDTQEKEVRAMVGSDVELSCACPEGSRFDLNDVYVYWQTSESK |
| | TVVTYHIPQNSSLENVDSRYRNRALMSPAGMLRGDFSLRLFNVTPQDEQKF |
| | HCLVLSQSLGFQEVLSVEVTLHVAANFSVPVVSAPHSPSQDELTFTCTSING |
| | YPRPNVYWINKTDNSLLDQALQNDTVFLNMRGLYDVVSVLRIARTPSVNI |
| | GCCIENVLLQQNLTVGSQTGNDIGERDKITENPVSTGEKNAATWS |
| SEQ ID NO: 673 | QVQLKQSGPGLVQPSQSLSITCTVSGFSLTNYGVHWVRQSPGKGLEWLGVI |
| anti-EGFR HC | WSGGNTDYNTPFTSRLSINKDNSKSQVFFKMNSLQSNDTAIYYCARALTYY |
| fused to IL12 | DYEFAYWGQGTLVTVSAASTKGPSVFPLAPSSKSTSGGTAALGCLVKDYFP |
| ECD | EPVTVSWNSGALTSGVHIFYAVLQSSGLYSLSSVVTVPSSSLGTQTYICNVN |
| | HKPSNTKVDKRVEPKSCDKTHTCPPCPAPELLGGPSVFLFPPKPKDTLMISR |
| | TPEVTCVVVDVSHEDPEVKFNWYVDGVEVHNAKTKPREEQYNSTYRVVS |
| | VLTVLHQDWLNGKEYKCKVSNKALPAPIEKTISKAKGQPREPQVYTLPPSR |
| | DELTKNQVSLTCLVKGFYPSDIAVEWESNGQPENNYKTTPPVLDSDGSFFL |
| | YSKLTVDKSRWQQGNVFSCSVMHEALHNHYTQKSLSLSPGKGGGGSGGG |
| | GSGGGGSIWELKKDVYVVELDWYPDAPGEMVVLTCDTPEEDGITWTLDQ |
| | SSEVLGSGKTLTIQVKEFGDAGQYTCHKGGEVLSHSLLLLHKKEDGIWSTD |
| | ILKDQKEPKNKTFLRCEAKNYSGRFTCWWLTTISTDLTFSVKSSRGSSDPQG |
| | VTCGAATLSAERVRGDNKEYEYSVECQEDSACPAAEESLPIEVMVDAVHK |
| | LKYENYTSSFFIRDIIKPDPPKNLQLKPLKNSRQVEVSWEYPDTWSTPHSYF |
| | SLTFCVQVQGKSKREKKDRVFTDKTSATVICRKNASISVRAQDRYYSSSWS |
| | EWASVPCSGGGGSGGGGSGGGGSRNLPVATPDPGMFPCLHHSQNLLRAVS |
| | NMLQKARQTLEFYPCTSEEIDHEDITKDKTSTVEACLPLELTKNESCLNSRE |
| | TSFITNGSCLASRKTSFMNIALCLSSIYEDLKMYQVEFKTMNAKLLMDPKR |
| | QIFLDQNMLAVIDELMQALNFNSETVPQKSSLEEPDFYKTKIKLCILLHAFRI |
| | RAVTIDRVMSYLNAS |
| SEQ ID NO: 674 | QVQLKQSGPGLVQPSQSLSITCTVSGFSLTNYGVHWVRQSPGKGLEWLGVI |
| anti-EGFR HC | WSGGNTDYNTPFTSRLSINKDNSKSQVFFKMNSLQSNDTAIYYCARALTYY |
| fused to IL15 | DYEFAYWGQGTLVTVSAASTKGPSVFPLAPSSKSTSGGTAALGCLVKDYFP |
| ECD | EPVTVSWNSGALTSGVHTFPAVLQSSGLYSLSSVVTVPSSSLGTQTYICNVN |
| | HKPSNTKVDKRVEPKSCDKTHTCPPCPAPELLGGPSVFLFPPKPKDTLMISR |
| | TPEVTCVVVDVSHEDPEVKFNWYVDGVEVHNAKTKPREEQYNSTYRVVS |
| | VLTVLHQDWLNGKEYKCKVSNKALPAPIEKTISKAKGQPREPQVYTLPPSR |
| | DELTKNQVSLTCLVKGFYPSDIAVEWESNGQPENNYKTTPPVLDSDGSFFL |
| | YSKLTVDKSRWQQGNVFSCSVMHEALHNHYTQKSLSLSPGKGGGGSGGG |
| | GSGGGGSNWVNVISDLKKIEDLIQSMHIDATLYTESDVHPSCKVTAMKCFL |
| | LELQVISLESGDASIHDTVENLIILANNSLSSNGNVTESGCKECEELEEKNIK |
| | EFLQSFVHIVQMFINTS |
| SEQ ID NO: 675 | QVQLKQSGPGLVQPSQSLSITCTVSGFSLTNYGVHWVRQSPGKGLEWLGVI |
| anti-EGFR HC | WSGGNTDYNTPFTSRLSINKDNSKSQVFFKMNSLQSNDTAIYYCARALTYY |
| fused to LIGHT | DYEFAYWGQGTLVTVSAASTKGPSVFPLAPSSKSTSGGTAALGCLVKDYFP |
| ECD | EPVTVSWNSGALTSGVHTFPAVLQSSGLYSLSSVVTVPSSSLGTQTYICNVN |
| | HKPSNTKVDKRVEPKSCDKTHTCPPCPAPELLGGPSVFLFPPKPKDTLMISR |
| | TPEVTCVVVDVSHEDPEVKFNWYVDGVEVHNAKTKPREEQYNSTYRVVS |
| | VLTVLHQDWLNGKEYKCKVSNKALPAPIEKTISKAKGQPREPQVYTLPPSR |
| | DELTKNQVSLTCLVKGFYPSDIAVEWESNGQPENNYKTTPPVLDSDGSFFL |
| | YSKLTVDKSRWQQGNVFSCSVMHEALHNHYTQKSLSLSPGKGGGGSGGG |
| | GSGGGGSDGPAGSWEQLIQERRSHEVNPAAHLTGANSSLTGSGGPLLWET |
| | QLGLAFLRGLSYHDGALVVTKAGYYYIYSKVQLGGVGCPLGLASTITHGL |
| | YKRTPRYPEELELLVSQQSPCGRATSSSRVWWDSSFLGGVVHLEAGEKVV |
| | VRVLDERLVRLRDGTRSYFGAFMV |
| SEQ ID NO: 676 | QVQLKQSGPGLVQPSQSLSITCTVSGFSLTNYGVHWVRQSPGKGLEWLGVI |
| anti-EGFR HC | WSGGNTDYNTPFTSRLSINKDNSKSQVFFKMNSLQSNDTAIYYCARALTYY |
| fused to OX40L | DYEFAYWGQGTLVTVSAASTKGPSVFPLAPSSKSTSGGTAALGCLVKDYFP |
| ECD | EPVTVSWNSGALTSGVHTFPAVLQSSGLYSLSSVVTVPSSSLGTQTYICNVN |
| | HKPSNTKVDKRVEPKSCDKTHTCPPCPAPELLGGPSVFLFPPKPKDTLMISR |
| | TPEVTCVVVDVSHEDPEVKFNWYVDGVEVHNAKTKPREEQYNSTYRVVS |
| | VLTVLHQDWLNGKEYKCKVSNKALPAPIEKTISKAKGQPREPQVYTLPPSR |
| | DELTKNQVSLTCLVKGFYPSDIAVEWESNGQPENNYKTTPPVLDSDGSFFL |
| | YSKLTVDKSRWQQGNVFSCSVMHEALHNHYTQKSLSLSPGKGGGGSGGG |
| | GSGGGGSQVSHRYPRIQSIKVQFTEYKKEKGFILTSQKEDEIMKVQNNSVII |
| | NCDGFYLISLKGYFSQEVNISLHYQKDEEPLFQLKKVRSVNSLMVASLTYK |
| | DKVYLNVTTDNTSLDDFHVNGGELILIHQNPGEFCVL |
| SEQ ID NO: 677 | DILLTQSPVILSVSPGERVSFSCRASQSIGTNIHWYQQRTNGSPRLLIKYASES |
| anti-EGFR LC | ISGIPSRFSGSGSGTDFTLSINSVESEDIADYYCQQNNNWPTTFGAGTKLELK |
| fused to 41BBL | RTVAAPSVFIFPPSDEQLKSGTASVVCLLNNFYPREAKVQWKVDNALQSGN |
| ECD | SQESVTEQDSKDSTYSLSSTLTLSKADYEKHKVYACEVTHQGLSSPVTKSF |
| | NRGECGGGGSGGGGSGGGGSACPWAVSGARASPGSAASPRLREGPELSPD |
| | DPAGLLDLRQGMFAQLVAQNVLLIDGPLSWYSDPGLAGVSLTGGLSYKED |
| | TKELVVAKAGVYYVFFQLELRRVVAGEGSGSVSLALHLQPLRSAAGAAAL |
| | ALTVDLPPASSEARNSAFGFQGRLLHLSAGQRLGVHLHTEARARHAWQLT |
| | QGATVLGLFRVTPEIPAGLPSPRSE |
| SEQ ID NO: 678 | DILLTQSPVILSVSPGERVSFSCRASQSIGTNIHWYQQRTNGSPRLLIKYASES |
| anti-EGFR LC | ISGIPSRFSGSGSGTDFTLSINSVESEDIADYYCQQNNNWPTTFGAGTKLELK |
| fused to CD30L | RTVAAPSVFIFPPSDEQLKSGTASVVCLLNNFYPREAKVQWKVDNALQSGN |
| ECD | SQESVTEQDSKDSTYSLSSTLTLSKADYEKHKVYACEVTHQGLSSPVTKSF |
| | NRGECGGGGSGGGGSGGGGSQRTDSIPNSPDNVPLKGGNCSEDLLCILKRA |
| | PFKKSWAYLQVAKHLNKTKLSWNKDGILHGVRYQDGNLVIQFPGLYFIIC |
| | QLQFLVQCPNNSVDLKLELLINKHIKKQALVTVCESGMQTKHVYQNLSQF |
| | LLDYLQVNTTISVNVDTFQYIDTSTFPLENVLSIFLYSNSD |
| SEQ ID NO: 679 | DILLTQSPVILSVSPGERVSFSCRASQSIGTNIHWYQQRTNGSPRLLIKYASES |
| anti-EGFR LC | ISGIPSRFSGSGSGTDFTLSINSVESEDIADYYCQQNNNWPTTFGAGTKLELK |
| fused to CD40L | RTVAAPSVFIFPPSDEQLKSGTASVVCLLNNFYPREAKVQWKVDNALQSGN |
| ECD | SQESVTEQDSKDSTYSLSSTLTLSKADYEKHKVYACEVTHQGLSSPVTKSF |
| | NRGECGGGGSGGGGSGGGGSGDQNPQIAAHVISEASSKTTSVLQWAEKGY |
| | YTMSNNLVTLENGKQLTVKRQGLYYIYAQVTFCSNREASSQAPFIASLCLK |
| | SPGRFERILLRAANTHSSAKPCGQQSIHLGGVFELQPGASVFVNVTDPSQVS |
| | HGTGFTSFGLLKL |
| SEQ ID NO: 680 | DILLTQSPVILSVSPGERVSFSCRASQSIGTNIHWYQQRTNGSPRLLIKYASES |
| anti-EGFR LC | ISGIPSRFSGSGSGTDFTLSINSVESEDIADYYCQQNNNWPTTFGAGTKLELK |
| fused to CD70 | RTVAAPSVFIFPPSDEQLKSGTASVVCLLNNFYPREAKVQWKVDNALQSGN |
| ECD | SQESVTEQDSKDSTYSLSSTLTLSKADYEKHKVYACEVTHQGLSSPVTKSF |
| | NRGECGGGGSGGGGSGGGGSQRFAQAQQQLPLESLGWDVAELQLNHTGP |
| | QQDPRLYWQGGPALGRSFLHGPELDKGQLRIHRDGIYMVHIQVTLAICSST |
| | TASRHHPTTLAVGICSPASRSISLLRLSFHQGCTIASQRLTPLARGDTLCTNL |
| | TGTLLPSRNTDETFFGVQWVRP |
| SEQ ID NO: 681 | DILLTQSPVILSVSPGERVSFSCRASQSIGTNIHWYQQRTNGSPRLLIKYASES |
| anti-EGFR LC | ISGIPSRFSGSGSGTDFTLSINSVESEDIADYYCQQNNNWPTTFGAGTKLELK |
| fused to GITRL | RTVAAPSVFIFPPSDEQLKSGTASVVCLLNNFYPREAKVQWKVDNALQSGN |
| ECD | SQESVTEQDSKDSTYSLSSTLTLSKADYEKHKVYACEVTHQGLSSPVTKSF |
| | NRGECGGGGSGGGGSGGGGSQLETAKEPCMAKFGPLPSKWQMASSEPPC |
| | VNKVSDWKLEILQNGLYLIYGQVAPNANYNDVAPFEVRLYKNKDMIQTLT |
| | NKSKIQNVGGTYELHVGDTIDLIFNSEHQVLKNNTYWGIILLANPQFIS |
| SEQ ID NO: 682 | DILLTQSPVILSVSPGERVSFSCRASQSIGTNIHWYQQRTNGSPRLLIKYASES |
| anti-EGFR LC | ISGIPSRFSGSGSGTDFTLSINSVESEDIADYYCQQNNNWPTTFGAGTKLELK |
| fused to ICOSL | RTVAAPSVFIFPPSDEQLKSGTASVVCLLNNFYPREAKVQWKVDNALQSGN |
| ECD | SQESVTEQDSKDSTYSLSSTLTLSKADYEKHKVYACEVTHQGLSSPVTKSF |
| | NRGECGGGGSGGGGSGGGGSDTQEKEVRAMVGSDVELSCACPEGSRFDL |
| | NDVYVYWQTSESKTVVTYHIPQNSSLENVDSRYRNRALMSPAGMLRGDFS |
| | LRLFNVTPQDEQKFHCLVLSQSLGFQEVLSVEVTLHVAANFSVPVVSAPHS |
| | PSQDELTFTCTSINGYPRPNVYWINKTDNSLLDQALQNDTVFLNMRGLYDV |
| | VSVLRIARTPSVNIGCCIENVLLQQNLTVGSQTGNDIGERDKITENPVSTGEK |
| | NAATWS |
| SEQ ID NO: 683 | DILLTQSPVILSVSPGERVSFSCRASQSIGTNIHWYQQRTNGSPRLLIKYASES |
| anti-EGFR LC | ISGIPSRFSGSGSGTDFTLSINSVESEDIADYYCQQNNNWPTTFGAGTKLELK |
| fused to IL12 | RTVAAPSVFIFPPSDEQLKSGTASVVCLLNNFYPREAKVQWKVDNALQSGN |
| ECD | SQESVTEQDSKDSTYSLSSTLTLSKADYEKHKVYACEVTHQGLSSPVTKSF |
| | NRGECGGGGSGGGGSGGGGSIWELKKDVYVVELDWYPDAPGEMVVLTC |
| | DTPEEDGITWTLDQSSEVLGSGKTLTIQVKEFGDAGQYTCHKGGEVLSHSL |
| | LLLHKKEDGIWSTDILKDQKEPKNKTFLRCEAKNYSGRFTCWWLTTISTDL |
| | TFSVKSSRGSSDPQGVTCGAATLSAERVRGDNKEYEYSVECQEDSACPAAE |
| | ESLPIEVMVDAVHKLKYENYTSSFFIRDIIKPDPPKNLQLKPLKNSRQVEVS |
| | WEYPDTWSTPHSYFSLTFCVQVQGKSKREKKDRVFTDKTSATVICRKNASI |
| | SVRAQDRYYSSSWSEWASVPCSGGGGSGGGGSGGGGSRNLPVATPDPGM |
| | FPCLHHSQNLLRAVSNMLQKARQTLEFYPCTSEEIDHEDITKDKTSTVEACL |
| | PLELTKNESCLNSRETSFITNGSCLASRKTSFMNIALCLSSIYEDLKMYQVEF |
| | KTMNAKLLMDPKRQIFLDQNMLAVIDELMQALNFNSETVPQKSSLEEPDF |
| | YKTKIKLCILLHAFRIRAVTIDRVMSYLNAS |
| SEQ ID NO: 684 | DILLTQSPVILSVSPGERVSFSCRASQSIGTNIHWYQQRTNGSPRLLIKYASES |
| anti-EGFR LC | ISGIPSRFSGSGSGTDFTLSINSVESEDIADYYCQQNNNWPTTFGAGTKLELK |
| fused to IL15 | RTVAAPSVFIFPPSDEQLKSGTASVVCLLNNFYPREAKVQWKVDNALQSGN |
| ECD | SQESVTEQDSKDSTYSLSSTLTLSKADYEKHKVYACEVTHQGLSSPVTKSF |
| | NRGECGGGGSGGGGSGGGGSNWVNVISDLKKIEDLIQSMHIDATLYTESD |
| | VHPSCKVTAMKCFLLELQVISLESGDASIHDTVENLIILANNSLSSNGNVTES |
| | GCKECEELEEKNIKEFLQSFVHIVQMFINTS |
| SEQ ID NO: 685 | DILLTQSPVILSVSPGERVSFSCRASQSIGTNIHWYQQRTNGSPRLLIKYASES |
| anti-EGFR LC | ISGIPSRFSGSGSGTDFTLSINSVESEDIADYYCQQNNNWPTTFGAGTKLELK |
| fused to LIGHT | RTVAAPSVFIFPPSDEQLKSGTASVVCLLNNFYPREAKVQWKVDNALQSGN |
| ECD | SQESVTEQDSKDSTYSLSSTLTLSKADYEKHKVYACEVTHQGLSSPVTKSF |
| | NRGECGGGGSGGGGSGGGGSDGPAGSWEQLIQERRSHEVNPAAHLTGANS |
| | SLTGSGGPLLWETQLGLAFLRGLSYHDGALVVTKAGYYYIYSKVQLGGVG |
| | CPLGLASTITHGLYKRTPRYPEELELLVSQQSPCGRATSSSRVWWDSSFLGG |
| | VVHLEAGEKVVVRVLDERLVRLRDGTRSYFGAFMV |
| SEQ ID NO: 686 | DILLTQSPVILSVSPGERVSFSCRASQSIGTNIHWYQQRTNGSPRLLIKYASES |
| anti-EGFR LC | ISGIPSRFSGSGSGTDFTLSINSVESEDIADYYCQQNNNWPTTFGAGTKLELK |
| fused to OX40L | RTVAAPSVFIFPPSDEQLKSGTASVVCLLNNFYPREAKVQWKVDNALQSGN |
| ECD | SQESVTEQDSKDSTYSLSSTLTLSKADYEKHKVYACEVTHQGLSSPVTKSF |
| | NRGECGGGGSGGGGSGGGGSQVSHRYPRIQSIKVQFTEYKKEKGFILTSQK |
| | EDEIMKVQNNSVIINCDGFYLISLKGYFSQEVNISLHYQKDEEPLFQLKKVR |
| | SVNSLMVASLTYKDKVYLNVTTDNTSLDDFHVNGGELILIHQNPGEFCVL |
| SEQ ID NO: 687 | QVQLVQSGAEVKKPGASVKVSCKASGYTFTRYGISWVRQAPGQGLEWMG |
| anti-IL17R HC | WISTYSGNTNYAQKLQGRVTMTTDTSTSTAYMELRSLRSDDTAVYYCARR |
| fused to 41BBL | QLYFDYWGQGTLVTVSSASTKGPSVFPLAPCSRSTSESTAALGCLVKDYFP |
| ECD | EPVTVSWNSGALTSGVHIFPAVLQSSGLYSLSSVVTVPSSNFGTQTYTCNV |
| | DHKPSNTKVDKTVERKCCVECPPCPAPPVAGPSVFLFPPKPKDTLMISRTPE |
| | VTCVVVDVSHEDPEVQFNWYVDGVEVHNAKTKPREEQFNSTFRVVSVLT |
| | VVHQDWLNGKEYKCKVSNKGLPAPIEKTISKTKGQPREPQVYTLPPSREEM |
| | STKNQVSLTCLVKGFYPSDIAVEWESNGQPENNYKTTPPMLDDGSFFLYSK |
| | LTVDKSRWQQGNVFSCSVMHEALHNHYTQKSLSLSPGKGGGGSGGGGSG |
| | GGGSACPWAVSGARASPGSAASPRLREGPELSPDDPAGLLDLRQGMFAQL |
| | VAQNVLLIDGPLSWYSDPGLAGVSLTGGLSYKEDTKELVVAKAGVYYVFF |
| | QLELRRVVAGEGSGSVSLALHLQPLRSAAGAAALALTVDLPPASSEARNSA |
| | FGFQGRLLHLSAGQRLGVHLHTEARARHAWQLTQGATVLGLFRVTPEIPA |
| | GLPSPRSE |
| SEQ ID NO: 688 | QVQLVQSGAEVKKPGASVKVSCKASGYTFTRYGISWVRQAPGQGLEWMG |
| anti-IL17R HC | WISTYSGNTNYAQKLQGRVTMTTDTSTSTAYMELRSLRSDDTAVYYCARR |
| fused to CD30L | QLYFDYWGQGTLVTVSSASTKGPSVFPLAPCSRSTSESTAALGCLVKDYFP |
| ECD | EPVTVSWNSGALTSGVHIFPAVLQSSGLYSLSSVVTVPSSNFGTQTYTCNV |
| | DHKPSNTKVDKTVERKCCVECPPCPAPPVAGPSVFLFPPKPKDTLMISRTPE |
| | VTCVVVDVSHEDPEVQFNWYVDGVEVHNAKTKPREEQFNSTFRVVSVLT |
| | VVHQDWLNGKEYKCKVSNKGLPAPIEKTISKTKGQPREPQVYTLPPSREEM |
| | TKNQVSLTCLVKGFYPSDIAVEWESNGQPENNYKTTPPMLDSDGSFFLYSK |
| | LTVDKSRWQQGNVFSCSVMHEALHNHYTQKSLSLSPGKGGGGSGGGGSG |
| | GGGSQRTDSIPNSPDNVPLKGGNCSEDLLCILKRAPFKKSWAYLQVAKHLN |
| | KTKLSWNKDGILHGVRYQDGNLVIQFPGLYFIICQLQFLVQCPNNSVDLKL |
| | ELLINKHIKKQALVTVCESGMQTKHVYQNLSQFLLDYLQVNTTISVNVDTF |
| | QYIDTSTFPLENVLSIFLYSNSD |
| SEQ ID NO: 689 | QVQLVQSGAEVKKPGASVKVSCKASGYTFTRYGISWVRQAPGQGLEWMG |
| anti-IL17R HC | WISTYSGNTNYAQKLQGRVTMTTDTSTSTAYMELRSLRSDDTAVYYCARR |
| fused to CD40L | QLYFDYWGQGTLVTVSSASTKGPSVFPLAPCSRSTSESTAALGCLVKDYFP |
| ECD | EPVTVSWNSGALTSGVHIFPAVLQSSGLYSLSSVVTVPSSNFGTQTYTCNV |
| | DHKPSNTKVDKTVERKCCVECPPCPAPPVAGPSVFLFPPKPKDTLMISRTPE |
| | VTCVVVDVSHEDPEVQFNWYVDGVEVHNAKTKPREEQFNSTFRVVSVLT |
| | VVHQDWLNGKEYKCKVSNKGLPAPIEKTISKTKGQPREPQVYTLPPSREEM |
| | TKNQVSLTCLVKGFYPSDIAVEWESNGQPENNYKTTPPMLDSDGSFFLYSK |
| | LTVDKSRWQQGNVFSCSVMHEALHNHYTQKSLSLSPGKGGGGSGGGGSG |
| | GGGSGDQNPQIAAHVISEASSKITSVLQWAEKGYYTMSNNLVTLENGKQL |
| | TVKRQGLYYIYAQVTFCSNREASSQAPFIASLCLKSPGRFERILLRAANTHSS |
| | AKPCGQQSIHLGGVFELQPGASVFVNVTDPSQVSHGTGFTSFGLLKL |
| SEQ ID NO: 690 | QVQLVQSGAEVKKPGASVKVSCKASGYTFTRYGISWVRQAPGQGLEWMG |
| anti-IL17R HC | WISTYSGNTNYAQKLQGRVTMTTDTSTSTAYMELRSLRSDDTAVYYCARR |
| fused to CD70 | QLYFDYWGQGTLVTVSSASTKGPSVFPLAPCSRSTSESTAALGCLVKDYFP |
| ECD | EPVTVSWNSGALTSGVHTFPAVLQSSGLYSLSSVVTVPSSNFGTQTYTCNV |
| | DHKPSNTKVDKTVERKCCVECPPCPAPPVAGPSVFLFPPKPKDTLMISRTPE |
| | VTCVVVDVSHEDPEVQFNWYVDGVEVHNAKTKPREEQFNSTFRVVSVLT |
| | VVHQDWLNGKEYKCKVSNKGLPAPIEKTISKTKGQPREPQVYTLPPSREEM |
| | TKNQVSLTCLVKGFYPSDIAVEWESNGQPENNYKTTPPMLDSDGSFFLYSK |
| | LTVDKSRWQQGNVFSCSVMHEALHNHYTQKSLSLSPGKGGGGSGGGGSG |
| | GGGSQRFAQAQQQLPLESLGWDVAELQLNHTGPQQDPRLYWQGGPALGR |
| | SFLHGPELDKGQLRIHRDGIYMVHIQVTLAICSSTTASRHHPTTLAVGICSPA |
| | SRSISLLRLSFHQGCTIASQRLTPLARGDTLCTNLTGTLLPSRNTDETFFGVQ |
| | WVRP |
| SEQ ID NO: 691 | QVQLVQSGAEVKKPGASVKVSCKASGYTFTRYGISWVRQAPGQGLEWMG |
| anti-IL17R HC | WISTYSGNTNYAQKLQGRVTMTTDTSTSTAYMELRSLRSDDTAVYYCARR |
| fused to GITRL | QLYFDYWGQGTLVTVSSASTKGPSVFPLAPCSRSTSESTAALGCLVKDYFP |
| ECD | EPVTVSWNSGALTSGVHTFPAVLQSSGLYSLSSVVTVPSSNFGTQTYTCNV |
| | DHKPSNTKVDKTVERKCCVECPPCPAPPVAGPSVFLFPPKPKDTLMISRTPE |
| | VTCVVVDVSHEDPEVQFNWYVDGVEVHNAKTKPREEQFNSTFRVVSVLT |
| | VVHQDWLNGKEYKCKVSNKGLPAPIEKTISKTKGQPREPQVYTLPPSREEM |
| | TKNQVSLTCLVKGFYPSDIAVEWESNGQPENNYKTTPPMLDSDGSFFLYSK |
| | LTVDKSRWQQGNVFSCSVMHEALHNHYTQKSLSLSPGKGGGGSGGGGSG |
| | GGGSQLETAKEPCMAKFGPLPSKWQMASSEPPCVNKVSDWKLEILQNGLY |
| | LIYGQVAPNANYNDVAPFEVRLYKNKDMIQTLTNKSKIQNVGGTYELHVG |
| | DTIDLIFNSEHQVLKNNTYWGIILLANPQFIS |
| SEQ ID NO: 692 | QVQLVQSGAEVKKPGASVKVSCKASGYTFTRYGISWVRQAPGQGLEWMG |
| anti-IL17R HC | WISTYSGNTNYAQKLQGRVTMTTDTSTSTAYMELRSLRSDDTAVYYCARR |
| fused to ICOSL | QLYFDYWGQGTLVTVSSASTKGPSVFPLAPCSRSTSESTAALGCLVKDYFP |
| ECD | EPVTVSWNSGALTSGVHIFPAVLQSSGLYSLSSVVTVPSSNFGTQTYTCNV |
| | DHKPSNTKVDKTVERKCCVECPPCPAPPVAGPSVFLFPPKPKDTLMISRTPE |
| | VTCVVVDVSHEDPEVQFNWYVDGVEVHNAKTKPREEQFNSTFRVVSVLT |
| | VVHQDWLNGKEYKCKVSNKGLPAPIEKTISKTKGQPREPQVYTLPPSREEM |
| | TKNQVSLTCLVKGFYPSDIAVEWESNGQPENNYKTTPPMLDSDGSFFLYSK |
| | LTVDKSRWQQGNVFSCSVMHEALHNHYTQKSLSLSPGKGGGGSGGGGSG |
| | GGGSDTQEKEVRAMVGSDVELSCACPEGSRFDLNDVYVYWQTSESKTVV |
| | TYHIPQNSSLENVDSRYRNRALMSPAGMLRGDFSLRLFNVTPQDEQKFHCL |
| | VLSQSLGFQEVLSVEVTLHVAANFSVPVVSAPHSPSQDELTFTCTSINGYPR |
| | PNVYWINKTDNSLLDQALQNDTVFLNMRGLYDVVSVLRIARTPSVNIGCCI |
| | ENVLLQQNLTVGSQTGNDIGERDKITENPVSTGEKNAATWS |
| SEQ ID NO: 693 | QVQLVQSGAEVKKPGASVKVSCKASGYTFTRYGISWVRQAPGQGLEWMG |
| anti-IL17R HC | WISTYSGNTNYAQKLQGRVTMTTDTSTSTAYMELRSLRSDDTAVYYCARR |
| fused to IL12 | QLYFDYWGQGTLVTVSSASTKGPSVFPLAPCSRSTSESTAALGCLVKDYFP |
| ECD | EPVTVSWNSGALTSGVHIFPAVLQSSGLYSLSSVVTVPSSNFGTQTYTCNV |
| | DHKPSNTKVDKTVERKCCVECPPCPAPPVAGPSVFLFPPKPKDTLMISRTPE |
| | VTCVVVDVSHEDPEVQFNWYVDGVEVHNAKTKPREEQFNSTFRVVSVLT |
| | VVHQDWLNGKEYKCKVSNKGLPAPIEKTISKTKGQPREPQVYTLPPSREEM |
| | TKNQVSLTCLVKGFYPSDIAVEWESNGQPENNYKTTPPMLDSDGSFFLYSK |
| | LTVDKSRWQQGNVFSCSVMHEALHNHYTQKSLSLSPGKGGGGSGGGGSG |
| | GGGSIWELKKDVYVVELDWYPDAPGEMVVLTCDTPEEDGITWTLDQSSEV |
| | LGSGKTLTIQVKEFGDAGQYTCHKGGEVLSHSLLLLHKKEDGIWSTDILKD |
| | QKEPKNKTFLRCEAKNYSGRFTCWWLTTISTDLTFSVKSSRGSSDPQGVTC |
| | GAATLSAERVRGDNKEYEYSVECQEDSACPAAEESLPIEVMVDAVHKLKY |
| | ENYTSSFFIRDIIKPDPPKNLQLKPLKNSRQVEVSWEYPDTWSTPHSYFSLTF |
| | CVQVQGKSKREKKDRVFTDKTSATVICRKNASISVRAQDRYYSSSWSEWA |
| | SVPCSGGGGSGGGGSGGGGSRNLPVATPDPGMFPCLHHSQNLLRAVSNML |
| | QKARQTLEFYPCTSEEIDHEDITKDKTSTVEACLPLELTKNESCLNSRETSFI |
| | TNGSCLASRKTSFMMALCLSSIYEDLKMYQVEFKTMNAKLLMDPKRQIFL |
| | DQNMLAVIDELMQALNFNSETVPQKSSLEEPDFYKTKIKLCILLHAFRIRAV |
| | TIDRVMSYLNAS |
| SEQ ID NO: 694 | QVQLVQSGAEVKKPGASVKVSCKASGYTFTRYGISWVRQAPGQGLEWMG |
| anti-IL17R HC | WISTYSGNTNYAQKLQGRVTMTTDTSTSTAYMELRSLRSDDTAVYYCARR |
| fused to IL15 | QLYFDYWGQGTLVTVSSASTKGPSVFPLAPCSRSTSESTAALGCLVKDYFP |
| ECD | EPVTVSWNSGALTSGVHIFPAVLQSSGLYSLSSVVTVPSSNFGTQTYTCNV |
| | DHKPSNTKVDKTVERKCCVECPPCPAPPVAGPSVFLFPPKPKDTLMISRTPE |
| | VTCVVVDVSHEDPEVQFNWYVDGVEVHNAKTKPREEQFNSTFRVVSVLT |
| | VVHQDWLNGKEYKCKVSNKGLPAPIEKTISKTKGQPREPQVYTLPPSREEM |
| | TKNQVSLTCLVKGFYPSDIAVEWESNGQPENNYKTTPPMLDSDGSFFLYSK |
| | LTVDKSRWQQGNVFSCSVMHEALHNHYTQKSLSLSPGKGGGGSGGGGSG |
| | GGGSNWVNVISDLKKIEDLIQSMHIDATLYTESDVHPSCKVTAMKCFLLEL |
| | QVISLESGDASIHDTVENLIILANNSLSSNGNVTESGCKECEELEEKNIKEFL |
| | QSFVHIVQMFINTS |
| SEQ ID NO: 695 | QVQLVQSGAEVKKPGASVKVSCKASGYTFTRYGISWVRQAPGQGLEWMG |
| anti-IL17R HC | WISTYSGNTNYAQKLQGRVTMTTDTSTSTAYMELRSLRSDDTAVYYCARR |
| fused to LIGHT | QLYFDYWGQGTLVTVSSASTKGPSVFPLAPCSRSTSESTAALGCLVKDYFP |
| ECD | EPVTVSWNSGALTSGVHIFPAVLQSSGLYSLSSVVTVPSSNFGTQTYTCNV |
| | DHKPSNTKVDKTVERKCCVECPPCPAPPVAGPSVFLFPPKPKDTLMISRTPE |
| | VTCVVVDVSHEDPEVQFNWYVDGVEVHNAKTKPREEQFNSTFRVVSVLT |
| | VVHQDWLNGKEYKCKVSNKGLPAPIEKTISKTKGQPREPQVYTLPPSREEM |
| | TKNQVSLTCLVKGFYPSDIAVEWESNGQPENNYKTTPPMLDSDGSFFLYSK |
| | LTVDKSRWQQGNVFSCSVMHEALHNHYTQKSLSLSPGKGGGGSGGGGSG |
| | GGGSDGPAGSWEQLIQERRSHEVNPAAHLTGANSSLTGSGGPLLWETQLG |
| | LAFLRGLSYHDGALVVTKAGYYYIYSKVQLGGVGCPLGLASTITHGLYKR |
| | TPRYPEELELLVSQQSPCGRATSSSRVWWDSSFLGGVVHLEAGEKVVVRV |
| | LDERLVRLRDGTRSYFGAFMV |
| SEQ ID NO: 696 | QVQLVQSGAEVKKPGASVKVSCKASGYTFTRYGISWVRQAPGQGLEWMG |
| anti-IL17R HC | WISTYSGNTNYAQKLQGRVTMTTDTSTSTAYMELRSLRSDDTAVYYCARR |
| fused to OX40L | QLYFDYWGQGTLVTVSSASTKGPSVFPLAPCSRSTSESTAALGCLVKDYFP |
| ECD | EPVTVSWNSGALTSGVHTFPAVLQSSGLYSLSSVVTVPSSNFGTQTYTCNV |
| | DHKPSNTKVDKTVERKCCVECPPCPAPPVAGPSVFLFPPKPKDTLMISRTPE |
| | VTCVVVDVSHEDPEVQFNWYVDGVEVHNAKTKPREEQFNSTFRVVSVLT |
| | VVHQDWLNGKEYKCKVSNKGLPAPIEKTISKTKGQPREPQVYTLPPSREEM |
| | TKNQVSLTCLVKGFYPSDIAVEWESNGQPENNYKTTPPMLDSDGSFFLYSK |
| | LTVDKSRWQQGNVFSCSVMHEALHNHYTQKSLSLSPGKGGGGSGGGGSG |
| | GGGSQVSHRYPRIQSIKVQFTEYKKEKGFILTSQKEDEIMKVQNNSVIINCD |
| | GFYLISLKGYFSQEVNISLHYQKDEEPLFQLKKVRSVNSLMVASLTYKDKV |
| | YLNVTTDNTSLDDFHVNGGELILIHQNPGEFCVL |
| SEQ ID NO: 697 | EIVMTQSPATLSVSPGERATLSCRASQSVSSNLAWFQQKPGQAPRPLIYDAS |
| anti-IL17R LC | TRATGVPARFSGSGSGTDFTLTISSLQSEDFAVYYCQQYDNWPLTFGGGTK |
| fused to 41BBL | VEIKRTVAAPSVFIFPPSDEQLKSGTASVVCLLNNFYPREAKVQWKVDNAL |
| ECD | QSGNSQESVTEQDSKDSTYSLSSTLTLSKADYEKHKVYACEVTHQGLSSPV |
| | TKSFNRGECGGGGSGGGGSGGGGSACPWAVSGARASPGSAASPRLREGPE |
| | LSPDDPAGLLDLRQGMFAQLVAQNVLLIDGPLSWYSDPGLAGVSLTGGLS |
| | YKEDTKELVVAKAGVYYVFFQLELRRVVAGEGSGSVSLALHLQPLRSAAG |
| | AAALALTVDLPPASSEARNSAFGFQGRLLHLSAGQRLGVHLHTEARARHA |
| | WQLTQGATVLGLFRVTPEIPAGLPSPRSE |
| SEQ ID NO: 698 | EIVMTQSPATLSVSPGERATLSCRASQSVSSNLAWFQQKPGQAPRPLIYDAS |
| anti-IL17R LC | TRATGVPARFSGSGSGTDFTLTISSLQSEDFAVYYCQQYDNWPLTFGGGTK |
| fused to CD30L | VEIKRTVAAPSVFIFPPSDEQLKSGTASVVCLLNNFYPREAKVQWKVDNAL |
| ECD | QSGNSQESVTEQDSKDSTYSLSSTLTLSKADYEKHKVYACEVTHQGLSSPV |
| | TKSFNRGECGGGGSGGGGSGGGGSQRTDSIPNSPDNVPLKGGNCSEDLLCI |
| | LKRAPFKKSWAYLQVAKHLNKTKLSWNKDGILHGVRYQDGNLVIQFPGL |
| | YFIICQLQFLVQCPNNSVDLKLELLINKHIKKQALVTVCESGMQTKHVYQN |
| | LSQFLLDYLQVNTTISVNVDTFQYIDTSTFPLENVLSIFLYSNSD |
| SEQ ID NO: 699 | EIVMTQSPATLSVSPGERATLSCRASQSVSSNLAWFQQKPGQAPRPLIYDAS |
| anti-IL17R LC | TRATGVPARFSGSGSGTDFTLTISSLQSEDFAVYYCQQYDNWPLTFGGGTK |
| fused to CD40L | VEIKRTVAAPSVFIFPPSDEQLKSGTASVVCLLNNFYPREAKVQWKVDNAL |
| ECD | QSGNSQESVTEQDSKDSTYSLSSTLTLSKADYEKHKVYACEVTHQGLSSPV |
| | TKSFNRGECGGGGSGGGGSGGGGSGDQNPQIAAHVISEASSKTTSVLQWA |
| | EKGYYTMSNNLVTLENGKQLTVKRQGLYYIYAQVTFCSNREASSQAPFIAS |
| | LCLKSPGRFERILLRAANTHSSAKPCGQQSIHLGGVFELQPGASVFVNVTDP |
| | SQVSHGTGFTSFGLLKL |
| SEQ ID NO: 700 | EIVMTQSPATLSVSPGERATLSCRASQSVSSNLAWFQQKPGQAPRPLIYDAS |
| anti-IL17R LC | TRATGVPARFSGSGSGTDFTLTISSLQSEDFAVYYCQQYDNWPLTFGGGTK |
| fused to CD70 | VEIKRTVAAPSVFIFPPSDEQLKSGTASVVCLLNNFYPREAKVQWKVDNAL |
| ECD | QSGNSQESVTEQDSKDSTYSLSSTLTLSKADYEKHKVYACEVTHQGLSSPV |
| | TKSFNRGECGGGGSGGGGSGGGGSQRFAQAQQQLPLESLGWDVAELQLN |
| | HTGPQQDPRLYWQGGPALGRSFLHGPELDKGQLRIHRDGIYMVHIQVTLAI |
| | CSSTTASRHHPTTLAVGICSPASRSISLLRLSFHQGCTIASQRLTPLARGDTLC |
| | TNLTGTLLPSRNTDEITTGVQWVRP |
| SEQ ID NO: 701 | EIVMTQSPATLSVSPGERATLSCRASQSVSSNLAWFQQKPGQAPRPLIYDAS |
| anti-IL17R LC | TRATGVPARFSGSGSGTDFTLTISSLQSEDFAVYYCQQYDNWPLTFGGGTK |
| fused to GITRL | VEIKRTVAAPSVFIFPPSDEQLKSGTASVVCLLNNFYPREAKVQWKVDNAL |
| ECD | QSGNSQESVTEQDSKDSTYSLSSTLTLSKADYEKHKVYACEVTHQGLSSPV |
| | TKSFNRGECGGGGSGGGGSGGGGSQLETAKEPCMAKFGPLPSKWQMASSE |
| | PPCVNKVSDWKLEILQNGLYLIYGQVAPNANYNDVAPFEVRLYKNKDMIQ |
| | TLTNKSKIQNVGGTYELHVGDTIDLIFNSEHQVLKNNTYWGIILLANPQFIS |
| SEQ ID NO: 702 | EIVMTQSPATLSVSPGERATLSCRASQSVSSNLAWFQQKPGQAPRPLIYDAS |
| anti-IL17R LC | TRATGVPARFSGSGSGTDFTLTISSLQSEDFAVYYCQQYDNWPLTFGGGTK |
| fused to ICOSL | VEIKRTVAAPSVFIFPPSDEQLKSGTASVVCLLNNFYPREAKVQWKVDNAL |
| ECD | QSGNSQESVTEQDSKDSTYSLSSTLTLSKADYEKHKVYACEVTHQGLSSPV |
| | TKSFNRGECGGGGSGGGGSGGGGSDTQEKEVRAMVGSDVELSCACPEGSR |
| | FDLNDVYVYWQTSESKTVVTYHIPQNSSLENVDSRYRNRALMSPAGMLRG |
| | DFSLRLFNVTPQDEQKFHCLVLSQSLGFQEVLSVEVTLHVAANFSVPVVSA |
| | PHSPSQDELTFTCTSINGYPRPNVYWINKTDNSLLDQALQNDTVFLNMRGL |
| | YDVVSVLRIARTPSVNIGCCIENVLLQQNLTVGSQTGNDIGERDKITENPVS |
| | TGEKNAATWS |
| SEQ ID NO: 703 | EIVMTQSPATLSVSPGERATLSCRASQSVSSNLAWFQQKPGQAPRPLIYDAS |
| anti- IL17R LC | TRATGVPARFSGSGSGTDFTLTISSLQSEDFAVYYCQQYDNWPLTFGGGTK |
| fused to IL12 | VEIKRTVAAPSVFIFPPSDEQLKSGTASVVCLLNNFYPREAKVQWKVDNAL |
| ECD | QSGNSQESVTEQDSKDSTYSLSSTLTLSKADYEKHKVYACEVTHQGLSSPV |
| | TKSFNRGECGGGGSGGGGSGGGGSIWELKKDVYVVELDWYPDAPGEMVV |
| | LTCDTPEEDGITWTLDQSSEVLGSGKTLTIQVKEFGDAGQYTCHKGGEVLS |
| | HSLLLLHKKEDGIWSTDILKDQKEPKNKIFLRCEAKNYSGRFTCWWLTTIS |
| | TDLTFSVKSSRGSSDPQGVTCGAATLSAERVRGDNKEYEYSVECQEDSACP |
| | AAEESLPIEVMVDAVHKLKYENYTSSFFIRDIIKPDPPKNLQLKPLKNSRQV |
| | EVSWEYPDTWSTPHSYFSLTFCVQVQGKSKREKKDRVFTDKTSATVICRK |
| | NASISVRAQDRYYSSSWSEWASVPCSGGGGSGGGGSGGGGSRNLPVATPD |
| | PGMFPCLHHSQNLLRAVSNMLQKARQTLEFYPCTSEEIDHEDITKDKTSTV |
| | EACLPLELTKNESCLNSRETSFITNGSCLASRKTSFMMALCLSSIYEDLKMY |
| | QVEFKTMNAKLLMDPKRQIFLDQNMLAVIDELMQALNFNSETVPQKSSLE |
| | EPDFYKTKIKLCILLHAFRIRAVTIDRVMSYLNAS |
| SEQ ID NO: 704 | EIVMTQSPATLSVSPGERATLSCRASQSVSSNLAWFQQKPGQAPRPLIYDAS |
| anti-IL17R LC | TRATGVPARFSGSGSGTDFTLTISSLQSEDFAVYYCQQYDNWPLTFGGGTK |
| fused to IL15 | VEIKRTVAAPSVFIFPPSDEQLKSGTASVVCLLNNFYPREAKVQWKVDNAL |
| ECD | QSGNSQESVTEQDSKDSTYSLSSTLTLSKADYEKHKVYACEVTHQGLSSPV |
| | TKSFNRGECGGGGSGGGGSGGGGSNWVNVISDLKKIEDLIQSMHIDATLYT |
| | ESDVHPSCKVTAMKCFLLELQVISLESGDASIHDTVENLIILANNSLSSNGN |
| | VTESGCKECEELEEKNIKEFLQSFVHIVQMFINTS |
| SEQ ID NO: 705 | EIVMTQSPATLSVSPGERATLSCRASQSVSSNLAWFQQKPGQAPRPLIYDAS |
| anti-IL17R LC | TRATGVPARFSGSGSGTDFTLTISSLQSEDFAVYYCQQYDNWPLTFGGGTK |
| fused to LIGHT | VEIKRTVAAPSVFIFPPSDEQLKSGTASVVCLLNNFYPREAKVQWKVDNAL |
| ECD | QSGNSQESVTEQDSKDSTYSLSSTLTLSKADYEKHKVYACEVTHQGLSSPV |
| | TKSFNRGECGGGGSGGGGSGGGGSDGPAGSWEQLIQERRSHEVNPAAHLT |
| | GANSSLTGSGGPLLWETQLGLAFLRGLSYHDGALVVTKAGYYYIYSKVQL |
| | GGVGCPLGLASTITHGLYKRTPRYPEELELLVSQQSPCGRATSSSRVWWDS |
| | SFLGGVVHLEAGEKVVVRVLDERLVRLRDGTRSYFGAFMV |
| SEQ ID NO: 706 | EIVMTQSPATLSVSPGERATLSCRASQSVSSNLAWFQQKPGQAPRPLIYDAS |
| anti-IL17R LC | TRATGVPARFSGSGSGTDFTLTISSLQSEDFAVYYCQQYDNWPLTFGGGTK |
| fused to OX40L | VEIKRTVAAPSVFIFPPSDEQLKSGTASVVCLLNNFYPREAKVQWKVDNAL |
| ECD | QSGNSQESVTEQDSKDSTYSLSSTLTLSKADYEKHKVYACEVTHQGLSSPV |
| | TKSFNRGECGGGGSGGGGSGGGGSQVSHRYPRIQSIKVQFTEYKKEKGFIL |
| | TSQKEDEIMKVQNNSVIINCDGFYLISLKGYFSQEVNISLHYQKDEEPLFQL |
| | KKVRSVNSLMVASLTYKDKVYLNVTTDNTSLDDFHVNGGELILIHQNPGE |
| | FCVL |
| SEQ ID NO: 707 | EVQLVESGGGLVQPGGSLRLSCAASGYTFTNYGMNWVRQAPGKGLEWVG |
| anti-VEGF HC | WINTYTGEPTYAADFKRRFTFSLDTSKSTAYLQMNSLRAEDTAVYYCAKY |
| fused to 41BBL | PHYYGSSHWYFDVWGQGTLVTVSSASTKGPSVFPLAPSSKSTSGGTAALG |
| ECD | CLVKDYFPEPVTVSWNSGALTSGVHTFPAVLQSSGLYSLSSVVTVPSSSLGT |
| | QTYICNVNHKPSNTKVDKKVEPKSCDKTHTCPPCPAPELLGGPSVFLFPPKP |
| | KDTLMISRTPEVTCVVVDVSHEDPEVKFNWYVDGVEVHNAKTKPREEQY |
| | NSTYRVVSVLTVLHQDWLNGKEYKCKVSNKALPAPIEKTISKAKGQPREP |
| | QVYTLPPSREEMTKNQVSLTCLVKGFYPSDIAVEWESNGQPENNYKTTPPV |
| | LDSDGSFFLYSKLTVDKSRWQQGNVFSCSVMHEALHNHYTQKSLSLSPGK |
| | GGGGSGGGGSGGGGSACPWAVSGARASPGSAASPRLREGPELSPDDPAGL |
| | LDLRQGMFAQLVAQNVLLIDGPLSWYSDPGLAGVSLTGGLSYKEDTKELV |
| | VAKAGVYYVFFQLELRRVVAGEGSGSVSLALHLQPLRSAAGAAALALTVD |
| | LPPASSEARNSAFGFQGRLLHLSAGQRLGVHLHTEARARHAWQLTQGATV |
| | LGLFRVTPEIPAGLPSPRSE |
| SEQ ID NO: 708 | EVQLVESGGGLVQPGGSLRLSCAASGYTFTNYGMNWVRQAPGKGLEWVG |
| anti-VEGF HC | WINTYTGEPTYAADFKRRFTFSLDTSKSTAYLQMNSLRAEDTAVYYCAKY |
| fused to CD30L | PHYYGSSHWYFDVWGQGTLVTVSSASTKGPSVFPLAPSSKSTSGGTAALG |
| ECD | CLVKDYFPEPVTVSWNSGALTSGVHTFPAVLQSSGLYSLSSVVTVPSSSLGT |
| | QTYICNVNHKPSNTKVDKKVEPKSCDKTHTCPPCPAPELLGGPSVFLFPPKP |
| | KDTLMISRTPEVTCVVVDVSHEDPEVKFNWYVDGVEVHNAKTKPREEQY |
| | NSTYRVVSVLTVLHQDWLNGKEYKCKVSNKALPAPIEKTISKAKGQPREP |
| | QVYTLPPSREEMTKNQVSLTCLVKGFYPSDIAVEWESNGQPENNYKTTPPV |
| | LDSDGSFFLYSKLTVDKSRWQQGNVFSCSVMHEALHNHYTQKSLSLSPGK |
| | GGGGSGGGGSGGGGSQRTDSIPNSPDNVPLKGGNCSEDLLCILKRAPFKKS |
| | WAYLQVAKHLNKTKLSWNKDGILHGVRYQDGNLVIQFPGLYFIICQLQFL |
| | VQCPNNSVDLKLELLINKHIKKQALVTVCESGMQTKHVYQNLSQFLLDYL |
| | QVNTTISVNVDTFQYIDTSTFPLENVLSIFLYSNSD |
| SEQ ID NO: 709 | EVQLVESGGGLVQPGGSLRLSCAASGYTFTNYGMNWVRQAPGKGLEWVG |
| anti-VEGF HC | WINTYTGEPTYAADFKRRFTFSLDTSKSTAYLQMNSLRAEDTAVYYCAKY |
| fused to CD40L | PHYYGSSHWYFDVWGQGTLVTVSSASTKGPSVFPLAPSSKSTSGGTAALG |
| ECD | CLVKDYFPEPVTVSWNSGALTSGVHTFPAVLQSSGLYSLSSVVTVPSSSLGT |
| | QTYICNVNHKPSNTKVDKKVEPKSCDKTHTCPPCPAPELLGGPSVFLFPPKP |
| | KDTLMISRTPEVTCVVVDVSHEDPEVKFNWYVDGVEVHNAKTKPREEQY |
| | NSTYRVVSVLTVLHQDWLNGKEYKCKVSNKALPAPIEKTISKAKGQPREP |
| | QVYTLPPSREEMTKNQVSLTCLVKGFYPSDIAVEWESNGQPENNYKTTPPV |
| | LDSDGSFFLYSKLTVDKSRWQQGNVFSCSVMHEALHNHYTQKSLSLSPGK |
| | GGGGSGGGGSGGGGSGDQNPQIAAHVISEASSKTTSVLQWAEKGYYTMSN |
| | NLVTLENGKQLTVKRQGLYYIYAQVTFCSNREASSQAPFIASLCLKSPGRFE |
| | RILLRAANTHSSAKPCGQQSIHLGGVFELQPGASVFVNVTDPSQVSHGTGFT |
| | SFGLLKL |
| SEQ ID NO: 710 | EVQLVESGGGLVQPGGSLRLSCAASGYTFTNYGMNWVRQAPGKGLEWVG |
| anti-VEGF HC | WINTYTGEPTYAADFKRRFTFSLDTSKSTAYLQMNSLRAEDTAVYYCAKY |
| fused to CD70 | PHYYGSSHWYFDVWGQGTLVTVSSASTKGPSVFPLAPSSKSTSGGTAALG |
| ECD | CLVKDYFPEPVTVSWNSGALTSGVHTFPAVLQSSGLYSLSSVVTVPSSSLGT |
| | QTYICNVNHKPSNTKVDKKVEPKSCDKTHTCPPCPAPELLGGPSVFLFPPKP |
| | KDTLMISRTPEVTCVVVDVSHEDPEVKFNWYVDGVEVHNAKTKPREEQY |
| | NSTYRVVSVLTVLHQDWLNGKEYKCKVSNKALPAPIEKTISKAKGQPREP |
| | QVYTLPPSREEMTKNQVSLTCLVKGFYPSDIAVEWESNGQPENNYKTTPPV |
| | LDSDGSFFLYSKLTVDKSRWQQGNVFSCSVMHEALHNHYTQKSLSLSPGK |
| | GGGGSGGGGSGGGGSQRFAQAQQQLPLESLGWDVAELQLNHTGPQQDPR |
| | LYWQGGPALGRSFLHGPELDKGQLRIHRDGIYMVHIQVTLAICSSTTASRH |
| | HPTTLAVGICSPASRSISLLRLSFHQGCTIASQRLTPLARGDTLCTNLTGTLLP |
| | SRNTDETFFGVQWVRP |
| SEQ ID NO: 711 | EVQLVESGGGLVQPGGSLRLSCAASGYTFTNYGMNWVRQAPGKGLEWVG |
| anti-VEGF HC | WINTYTGEPTYAADFKRRFTFSLDTSKSTAYLQMNSLRAEDTAVYYCAKY |
| fused to GITRL | PHYYGSSHWYFDVWGQGTLVTVSSASTKGPSVFPLAPSSKSTSGGTAALG |
| ECD | CLVKDYFPEPVTVSWNSGALTSGVHTFPAVLQSSGLYSLSSVVTVPSSSLGT |
| | QTYICNVNHKPSNTKVDKKVEPKSCDKTHTCPPCPAPELLGGPSVFLFPPKP |
| | KDTLMISRTPEVTCVVVDVSHEDPEVKFNWYVDGVEVHNAKTKPREEQY |
| | NSTYRVVSVLTVLHQDWLNGKEYKCKVSNKALPAPIEKTISKAKGQPREP |
| | QVYTLPPSREEMTKNQVSLTCLVKGFYPSDIAVEWESNGQPENNYKTTPPV |
| | LDSDGSFFLYSKLTVDKSRWQQGNVFSCSVMHEALHNHYTQKSLSLSPGK |
| | GGGGSGGGGSGGGGSQLETAKEPCMAKFGPLPSKWQMASSEPPCVNKVS |
| | DWKLEILQNGLYLIYGQVAPNANYNDVAPFEVRLYKNKDMIQTLTNKSKI |
| | QNVGGTYELHVGDTIDLIFNSEHQVLKNNTYWGIILLANPQFIS |
| SEQ ID NO: 712 | EVQLVESGGGLVQPGGSLRLSCAASGYTFTNYGMNWVRQAPGKGLEWVG |
| anfi-VEGF HC | WINTYTGEPTYAADFKRRFTFSLDTSKSTAYLQMNSLRAEDTAVYYCAKY |
| fused to ICOSL | PHYYGSSHWYFDVWGQGTLVTVSSASTKGPSVFPLAPSSKSTSGGTAALG |
| ECD | CLVKDYFPEPVTVSWNSGALTSGVHTFPAVLQSSGLYSLSSVVTVPSSSLGT |
| | QTYICNVNHKPSNTKVDKKVEPKSCDKTHTCPPCPAPELLGGPSVFLFPPKP |
| | KDTLMISRTPEVTCVVVDVSHEDPEVKFNWYVDGVEVHNAKTKPREEQY |
| | NSTYRVVSVLTVLHQDWLNGKEYKCKVSNKALPAPIEKTISKAKGQPREP |
| | QVYTLPPSREEMTKNQVSLTCLVKGFYPSDIAVEWESNGQPENNYKFIPPV |
| | LDSDGSFFLYSKLTVDKSRWQQGNVFSCSVMHEALHNHYTQKSLSLSPGK |
| | GGGGSGGGGSGGGGSDTQEKEVRAMVGSDVELSCACPEGSRFDLNDVYV |
| | YWQTSESKTVVTYHIPQNSSLENVDSRYRNRALMSPAGMLRGDFSLRLFN |
| | VTPQDEQKFHCLVLSQSLGFQEVLSVEVTLHVAANFSVPVVSAPHSPSQDE |
| | LTFTCTSINGYPRPNVYWINKTDNSLLDQALQNDTVFLNMRGLYDVVSVL |
| | RIARTPSVNIGCCIENVLLQQNLTVGSQTGNDIGERDKITENPVSTGEKNAA |
| | TWS |
| | EVQLVESGGGLVQPGGSLRLSCAASGYTFTNYGMNWVRQAPGKGLEWVG |
| SEQ ID NO: 713 | WINTYTGEPTYAADFKRRFTFSLDTSKSTAYLQMNSLRAEDTAVYYCAKY |
| anti-VEGF HC | PHYYGSSHWYFDVWGQGTLVTVSSASTKGPSVFPLAPSSKSTSGGTAALG |
| fused to IL12 | CLVKDYFPEPVTVSWNSGALTSGVHTFPAVLQSSGLYSLSSVVTVPSSSLGT |
| ECD | QTYICNVNHKPSNTKVDKKVEPKSCDKTHTCPPCPAPELLGGPSVFLFPPKP |
| | KDTLMISRTPEVTCVVVDVSHEDPEVKFNWYVDGVEVHNAKTKPREEQY |
| | NSTYRVVSVLTVLHQDWLNGKEYKCKVSNKALPAPIEKTISKAKGQPREP |
| | QVYTLPPSREEMTKNQVSLTCLVKGFYPSDIAVEWESNGQPENNYKTTPPV |
| | LDSDGSFFLYSKLTVDKSRWQQGNVFSCSVMHEALHNHYTQKSLSLSPGK |
| | GGGGSGGGGSGGGGSIWELKKDVYVVELDWYPDAPGEMVVLTCDTPEED |
| | GITWTLDQSSEVLGSGKTLTIQVKEFGDAGQYTCHKGGEVLSHSLLLLHKK |
| | EDGIWSTDILKDQKEPKNKTFLRCEAKNYSGRFTCWWLTTISTDLTFSVKSS |
| | RGSSDPQGVTCGAATLSAERVRGDNKEYEYSVECQEDSACPAAEESLPIEV |
| | MVDAVHKLKYENYTSSFFIRDIIKPDPPKNLQLKPLKNSRQVEVSWEYPDT |
| | WSTPHSYFSLTFCVQVQGKSKREKKDRVFTDKTSATVICRKNASISVRAQD |
| | RYYSSSWSEWASVPCSGGGGSGGGGSGGGGSRNLPVATPDPGMFPCLHHS |
| | QNLLRAVSNMLQKARQTLEFYPCTSEEIDHEDITKDKTSTVEACLPLELTKN |
| | ESCLNSRETSFITNGSCLASRKTSFMMALCLSSIYEDLKMYQVEFKTMNAK |
| | LLMDPKRQIFLDQNMLAVIDELMQALNFNSETVPQKSSLEEPDFYKTKIKL |
| | CILLHAFRIRAVTIDRVMSYLNAS |
| SEQ ID NO: 714 | EVQLVESGGGLVQPGGSLRLSCAASGYTFTNYGMNWVRQAPGKGLEWVG |
| anti-VEGF HC | WINTYTGEPTYAADFKRRFTFSLDTSKSTAYLQMNSLRAEDTAVYYCAKY |
| fused to IL15 | PHYYGSSHWYFDVWGQGTLVTVSSASTKGPSVFPLAPSSKSTSGGTAALG |
| ECD | CLVKDYFPEPVTVSWNSGALTSGVHTFPAVLQSSGLYSLSSVVTVPSSSLGT |
| | QTYICNVNHKPSNTKVDKKVEPKSCDKTHTCPPCPAPELLGGPSVFLFPPKP |
| | KDTLMISRTPEVTCVVVDVSHEDPEVKFNWYVDGVEVHNAKTKPREEQY |
| | NSTYRVVSVLTVLHQDWLNGKEYKCKVSNKALPAPIEKTISKAKGQPREP |
| | QVYTLPPSREEMTKNQVSLTCLVKGFYPSDIAVEWESNGQPENNYKTTPPV |
| | LDSDGSFFLYSKLTVDKSRWQQGNVFSCSVMHEALHNHYTQKSLSLSPGK |
| | GGGGSGGGGSGGGGSNWVNVISDLKKIEDLIQSMHIDATLYTESDVHPSCK |
| | VTAMKCFLLELQVISLESGDASIHDTVENLIILANNSLSSNGNVTESGCKECE |
| | ELEEKNIKEFLQSFVHIVQMFINTS |
| SEQ ID NO: 715 | EVQLVESGGGLVQPGGSLRLSCAASGYTFTNYGMNWVRQAPGKGLEWVG |
| anti-VEGF HC | WINTYTGEPTYAADFKRRFTFSLDTSKSTAYLQMNSLRAEDTAVYYCAKY |
| fused to LIGHT | PHYYGSSHWYFDVWGQGTLVTVSSASTKGPSVFPLAPSSKSTSGGTAALG |
| ECD | CLVKDYFPEPVTVSWNSGALTSGVHTFPAVLQSSGLYSLSSVVTVPSSSLGT |
| | QTYICNVNHKPSNTKVDKKVEPKSCDKTHTCPPCPAPELLGGPSVFLFPPKP |
| | KDTLMISRTPEVTCVVVDVSHEDPEVKFNWYVDGVEVHNAKTKPREEQY |
| | NSTYRVVSVLTVLHQDWLNGKEYKCKVSNKALPAPIEKTISKAKGQPREP |
| | QVYTLPPSREEMTKNQVSLTCLVKGFYPSDIAVEWESNGQPENNYKTTPPV |
| | LDSDGSFFLYSKLTVDKSRWQQGNVFSCSVMHEALHNHYTQKSLSLSPGK |
| | GGGGSGGGGSGGGGSDGPAGSWEQLIQERRSHEVNPAAHLTGANSSLTGS |
| | GGPLLWETQLGLAFLRGLSYHDGALVVTKAGYYYIYSKVQLGGVGCPLGL |
| | ASTITHGLYKRTPRYPEELELLVSQQSPCGRATSSSRVWWDSSFLGGVVHL |
| | EAGEKVVVRVLDERLVRLRDGTRSYFGAFMV |
| SEQ ID NO: 716 | EVQLVESGGGLVQPGGSLRLSCAASGYTFTNYGMNWVRQAPGKGLEWVG |
| anti-VEGF HC | WINTYTGEPTYAADFKRRFTFSLDTSKSTAYLQMNSLRAEDTAVYYCAKY |
| fused to OX40L | PHYYGSSHWYFDVWGQGTLVTVSSASTKGPSVFPLAPSSKSTSGGTAALG |
| ECD | CLVKDYFPEPVTVSWNSGALTSGVHTFPAVLQSSGLYSLSSVVTVPSSSLGT |
| | QTYICNVNHKPSNTKVDKKVEPKSCDKTHTCPPCPAPELLGGPSVFLFPPKP |
| | KDTLMISRTPEVTCVVVDVSHEDPEVKFNWYVDGVEVHNAKTKPREEQY |
| | NSTYRVVSVLTVLHQDWLNGKEYKCKVSNKALPAPIEKTISKAKGQPREP |
| | QVYTLPPSREEMTKNQVSLTCLVKGFYPSDIAVEWESNGQPENNYKTTPPV |
| | LDSDGSFFLYSKLTVDKSRWQQGNVFSCSVMHEALHNHYTQKSLSLSPGK |
| | GGGGSGGGGSGGGGSQVSHRYPRIQSIKVQFTEYKKEKGFILTSQKEDEIM |
| | KVQNNSVIINCDGFYLISLKGYFSQEVNISLHYQKDEEPLFQLKKVRSVNSL |
| | MVASLTYKDKVYLNVTTDNTSLDDFHVNGGELILIHQNPGEFCVL |
| SEQ ID NO: 717 | DIQMTQSPSSLSASVGDRVTITCSASQDISNYLNWYQQKPGKAPKVLIYFTS |
| anti-VEGF LC | SLHSGVPSRFSGSGSGTDFTLTISSLQPEDFATYYCQQYSTVPWTFGQGTKV |
| fused to 41BBL | EIKRTVAAPSVFIFPPSDEQLKSGTASVVCLLNNFYPREAKVQWKVDNALQ |
| ECD | SGNSQESVTEQDSKDSTYSLSSTLTLSKADYEKHKVYACEVTHQGLSSPVT |
| | KSFNRGECGGGGSGGGGSGGGGSACPWAVSGARASPGSAASPRLREGPEL |
| | SPDDPAGLLDLRQGMFAQLVAQNVLLIDGPLSWYSDPGLAGVSLTGGLSY |
| | KEDTKELVVAKAGVYYVFFQLELRRVVAGEGSGSVSLALHLQPLRSAAGA |
| | AALALTVDLPPASSEARNSAFGFQGRLLHLSAGQRLGVHLHTEARARHAW |
| | QLTQGATVLGLFRVTPEIPAGLPSPRSE |
| SEQ ID NO: 718 | DIQMTQSPSSLSASVGDRVTITCSASQDISNYLNWYQQKPGKAPKVLIYFTS |
| anti-VEGF LC | SLHSGVPSRFSGSGSGTDFTLTISSLQPEDFATYYCQQYSTVPWTFGQGTKV |
| fused to CD30L | EIKRTVAAPSVFIFPPSDEQLKSGTASVVCLLNNFYPREAKVQWKVDNALQ |
| ECD | SGNSQESVTEQDSKDSTYSLSSTLTLSKADYEKHKVYACEVTHQGLSSPVT |
| | KSFNRGECGGGGSGGGGSGGGGSQRTDSIPNSPDNVPLKGGNCSEDLLCIL |
| | KRAPFKKSWAYLQVAKHLNKTKLSWNKDGILHGVRYQDGNLVIQFPGLY |
| | FIICQLQFLVQCPNNSVDLKLELLINKHIKKQALVTVCESGMQTKHVYQNL |
| | SQFLLDYLQVNTTISVNVDTFQYIDTSTFPLENVLSIFLYSNSD |
| SEQ ID NO: 719 | DIQMTQSPSSLSASVGDRVTITCSASQDISNYLNWYQQKPGKAPKVLIYFTS |
| anti-VEGF LC | SLHSGVPSRFSGSGSGTDFTLTISSLQPEDFATYYCQQYSTVPWTFGQGTKV |
| fused to CD40L | EIKRTVAAPSVFIFPPSDEQLKSGTASVVCLLNNFYPREAKVQWKVDNALQ |
| ECD | SGNSQESVTEQDSKDSTYSLSSTLTLSKADYEKHKVYACEVTHQGLSSPVT |
| | KSFNRGECGGGGSGGGGSGGGGSGDQNPQIAAHVISEASSKTTSVLQWAE |
| | KGYYTMSNNLVTLENGKQLTVKRQGLYYIYAQVTFCSNREASSQAPFIASL |
| | CLKSPGRFERILLRAANTHSSAKPCGQQSIHLGGVFELQPGASVFVNVTDPS |
| | QVSHGTGFTSFGLLKL |
| SEQ ID NO: 720 | DIQMTQSPSSLSASVGDRVTITCSASQDISNYLNWYQQKPGKAPKVLIYFTS |
| anti-VEGF LC | SLHSGVPSRFSGSGSGTDFTLTISSLQPEDFATYYCQQYSTVPWTFGQGTKV |
| fused to CD70 | EIKRTVAAPSVFIFPPSDEQLKSGTASVVCLLNNFYPREAKVQWKVDNALQ |
| ECD | SGNSQESVTEQDSKDSTYSLSSTLTLSKADYEKHKVYACEVTHQGLSSPVT |
| | KSFNRGECGGGGSGGGGSGGGGSQRFAQAQQQLPLESLGWDVAELQLNH |
| | TGPQQDPRLYWQGGPALGRSFLHGPELDKGQLRIHRDGIYMVHIQVTLAIC |
| | SSTTASRHHPTTLAVGICSPASRSISLLRLSFHQGCTIASQRLTPLARGDTLCT |
| | NLTGTLLPSRNTDETFFGVQWVRP |
| SEQ ID NO: 721 | DIQMTQSPSSLSASVGDRVTITCSASQDISNYLNWYQQKPGKAPKVLIYFTS |
| anti-VEGF LC | SLHSGVPSRFSGSGSGTDFTLTISSLQPEDFATYYCQQYSTVPWTFGQGTKV |
| fused to GITRL | EIKRTVAAPSVFIFPPSDEQLKSGTASVVCLLNNFYPREAKVQWKVDNALQ |
| ECD | SGNSQESVTEQDSKDSTYSLSSTLTLSKADYEKHKVYACEVTHQGLSSPVT |
| | KSFNRGECGGGGSGGGGSGGGGSQLETAKEPCMAKFGPLPSKWQMASSEP |
| | PCVNKVSDWKLEILQNGLYLIYGQVAPNANYNDVAPFEVRLYKNKDMIQT |
| | LTNKSKIQNVGGTYELHVGDTIDLIFNSEHQVLKNNTYWGIILLANPQFIS |
| SEQ ID NO: 722 | DIQMTQSPSSLSASVGDRVTITCSASQDISNYLNWYQQKPGKAPKVLIYFTS |
| anti-VEGF LC | SLHSGVPSRFSGSGSGTDFTLTISSLQPEDFATYYCQQYSTVPWTFGQGTKV |
| fused to ICOSL | EIKRTVAAPSVFIFPPSDEQLKSGTASVVCLLNNFYPREAKVQWKVDNALQ |
| ECD | SGNSQESVTEQDSKDSTYSLSSTLTLSKADYEKHKVYACEVTHQGLSSPVT |
| | KSFNRGECGGGGSGGGGSGGGGSDTQEKEVRAMVGSDVELSCACPEGSRF |
| | DLNDVYVYWQTSESKTVVTYHIPQNSSLENVDSRYRNRALMSPAGMLRG |
| | DFSLRLFNVTPQDEQKFHCLVLSQSLGFQEVLSVEVTLHVAANFSVPVVSA |
| | PHSPSQDELTFTCTSINGYPRPNVYWINKTDNSLLDQALQNDTVFLNMRGL |
| | YDVVSVLRIARTPSVNIGCCIENVLLQQNLTVGSQTGNDIGERDKITENPVS |
| | TGEKNAATWS |
| SEQ ID NO: 723 | DIQMTQSPSSLSASVGDRVTITCSASQDISNYLNWYQQKPGKAPKVLIYFTS |
| anti-VEGF LC | SLHSGVPSRFSGSGSGTDFTLTISSLQPEDFATYYCQQYSTVPWTFGQGTKV |
| fused to IL12 | EIKRTVAAPSVFIFPPSDEQLKSGTASVVCLLNNFYPREAKVQWKVDNALQ |
| ECD | SGNSQESVTEQDSKDSTYSLSSTLTLSKADYEKHKVYACEVTHQGLSSPVT |
| | KSFNRGECGGGGSGGGGSGGGGSIWELKKDVYVVELDWYPDAPGEMVVL |
| | TCDTPEEDGITWTLDQSSEVLGSGKTLTIQVKEFGDAGQYTCHKGGEVLSH |
| | SLLLLHKKEDGIWSTDILKDQKEPKNKITLRCEAKNYSGRFTCWWLTTIST |
| | DLTFSVKSSRGSSDPQGVTCGAATLSAERVRGDNKEYEYSVECQEDSACPA |
| | AEESLPIEVMVDAVHKLKYENYTSSFFIRDIIKPDPPKNLQLKPLKNSRQVE |
| | VSWEYPDTWSTPHSYFSLTFCVQVQGKSKREKKDRVFTDKTSATVICRKN |
| | ASISVRAQDRYYSSSWSEWASVPCSGGGGSGGGGSGGGGSRNLPVATPDP |
| | GMFPCLHHSQNLLRAVSNMLQKARQTLEFYPCTSEEIDHEDITKDKTSTVE |
| | ACLPLELTKNESCLNSRETSFITNGSCLASRKTSFMMALCLSSIYEDLKMYQ |
| | VEFKTMNAKLLMDPKRQIFLDQNMLAVIDELMQALNFNSETVPQKSSLEEP |
| | DFYKTKIKLCILLHAFRIRAVTIDRVMSYLNAS |
| SEQ ID NO: 724 | DIQMTQSPSSLSASVGDRVTITCSASQDISNYLNWYQQKPGKAPKVLIYFTS |
| anti-VEGF LC | SLHSGVPSRFSGSGSGTDFTLTISSLQPEDFATYYCQQYSTVPWTFGQGTKV |
| fused to IL15 | EIKRTVAAPSVFIFPPSDEQLKSGTASVVCLLNNFYPREAKVQWKVDNALQ |
| ECD | SGNSQESVTEQDSKDSTYSLSSTLTLSKADYEKHKVYACEVTHQGLSSPVT |
| | KSFNRGECGGGGSGGGGSGGGGSNWVNVISDLKKIEDLIQSMHIDATLYTE |
| | SDVHPSCKVTAMKCFLLELQVISLESGDASIHDTVENLIILANNSLSSNGNV |
| | TESGCKECEELEEKNIKEFLQSFVHIVQMFINTS |
| SEQ ID NO: 725 | DIQMTQSPSSLSASVGDRVTITCSASQDISNYLNWYQQKPGKAPKVLIYFTS |
| anti-VEGF LC | SLHSGVPSRFSGSGSGTDFTLTISSLQPEDFATYYCQQYSTVPWTFGQGTKV |
| fused to LIGHT | EIKRTVAAPSVFIFPPSDEQLKSGTASVVCLLNNFYPREAKVQWKVDNALQ |
| ECD | SGNSQESVTEQDSKDSTYSLSSTLTLSKADYEKHKVYACEVTHQGLSSPVT |
| | KSFNRGECGGGGSGGGGSGGGGSDGPAGSWEQLIQERRSHEVNPAAHLTG |
| | ANSSLTGSGGPLLWETQLGLAFLRGLSYHDGALVVTKAGYYYIYSKVQLG |
| | GVGCPLGLASTITHGLYKRTPRYPEELELLVSQQSPCGRATSSSRVWWDSS |
| | FLGGVVHLEAGEKVVVRVLDERLVRLRDGTRSYFGAFMV |
| SEQ ID NO: 726 | DIQMTQSPSSLSASVGDRVTITCSASQDISNYLNWYQQKPGKAPKVLIYFTS |
| anti-VEGF LC | SLHSGVPSRFSGSGSGTDFTLTISSLQPEDFATYYCQQYSTVPWTFGQGTKV |
| fused to OX40L | EIKRTVAAPSVFIFPPSDEQLKSGTASVVCLLNNFYPREAKVQWKVDNALQ |
| ECD | SGNSQESVTEQDSKDSTYSLSSTLTLSKADYEKHKVYACEVTHQGLSSPVT |
| | KSFNRGECGGGGSGGGGSGGGGSQVSHRYPRIQSIKVQFTEYKKEKGFILT |
| | SQKEDEIMKVQNNSVIINCDGFYLISLKGYFSQEVNISLHYQKDEEPLFQLK |
| | KVRSVNSLMVASLTYKDKVYLNVTTDNTSLDDFHVNGGELILIHQNPGEFC |
| | VL |
| SEQ ID NO: 727 | DIQLTQSPASLAVSLGQRATISCKASQSVDYDGDSYLNWYQQIPGQPPKLLI |
| CD3/CD19 | YDASNLVSGIPPRFSGSGSGTDFTLNIHPVEKVDAATYHCQQSTEDPWTFG |
| BiTE-Fc- | GGTKLEIKGGGGSGGGGSGGGGSQVQLQQSGAELVRPGSSVKISCKASGY |
| BTLAecd | AFSSYWMNWVKQRPGQGLEWIGQIWPGDGDTNYNGKFKGKATLTADESS |
| | STAYMQLSSLASEDSAVYFCARRETTTVGRYYYAMDYWGQGTTVTVSSG |
| | GGGSDIKLQQSGAELARPGASVKMSCKTSGYTFTRYTMHWVKQRPGQGL |
| | EWIGYINPSRGYTNYNQKFKDKATLTTDKSSSTAYMQLSSLTSEDSAVYYC |
| | ARYYDDHYCLDYWGQGTTLTVSSVEGGSGGSGGSGGSGGVDDIQLTQSPA |
| | IMSASPGEKVTMTCRASSSVSYMNWYQQKSGTSPKRWIYDTSKVASGVPY |
| | RFSGSGSGTSYSLTISSMEAEDAATYYCQQWSSNPLTFGAGTKLELKASTK |
| | GPSVFPLAPSSKSTSGGTAALGCLVKDYFPEPVTVSWNSGALTSGVHTFPA |
| | VLQSSGLYSLSSVVTVPSSSLGTQTYICNVNHKPSNTKVDKKVEPKSCDKT |
| | HTCPPCPAPELLGGPSVFLFPPKPKDTLMISRTPEVTCVVVDVSHEDPEVKF |
| | NWYVDGVEVHNAKTKPREEQYNSTYRVVSVLTVLHQDWLNGKEYKCKV |
| | SNKALPAPIEKTISKAKGQPREPQVYTLPPSREEMTKNQVSLTCLVKGFYPS |
| | DIAVEWESNGQPENNYKTTPPVLDSDGSFFLYSKLTVDKSRWQQGNVFSCS |
| | VMHEALHNHYTQKSLSLSPGKGGGGSGGGGSGGGGSKESCDVQLYIKRQS |
| | EHSILAGDPFELECPVKYCANRPHVTWCKLNGTTCVKLEDRQTSWKEEKNI |
| | SFFILHFEPVLPNDNGSYRCSANFQSNLIESHSTTLYVTDVKSASERPSKDEM |
| | AS |
| SEQ ID NO: 728 | DIQLTQSPASLAVSLGQRATISCKASQSVDYDGDSYLNWYQQIPGQPPKLLI |
| CD3/CD19 | YDASNLVSGIPPRFSGSGSGTDFTLNIHPVEKVDAATYHCQQSTEDPWTFG |
| BiTE-BTLAecd | GGTKLEIKGGGGSGGGGSGGGGSQVQLQQSGAELVRPGSSVKISCKASGY |
| | AFSSYWMNWVKQRPGQGLEWIGQIWPGDGDTNYNGKFKGKATLTADESS |
| | STAYMQLSSLASEDSAVYFCARRETTTVGRYYYAMDYWGQGTTVTVSSG |
| | GGGSDIKLQQSGAELARPGASVKMSCKTSGYTFTRYTMHWVKQRPGQGL |
| | EWIGYINPSRGYTNYNQKFKDKATLTTDKSSSTAYMQLSSLTSEDSAVYYC |
| | ARYYDDHYCLDYWGQGTTLTVSSVEGGSGGSGGSGGSGGVDDIQLTQSPA |
| | IMSASPGEKVTMTCRASSSVSYMNWYQQKSGTSPKRWIYDTSKVASGVPY |
| | RFSGSGSGTSYSLTISSMEAEDAATYYCQQWSSNPLTFGAGTKLELKGGGG |
| | SGGGGSGGGGSKESCDVQLYIKRQSEHSILAGDPFELECPVKYCANRPHVT |
| | WCKLNGTTCVKLEDRQTSWKEEKNISFFILHFEPVLPNDNGSYRCSANFQS |
| | NLIESHSTTLYVTDVKSASERPSKDEMASHHHHHH |
| SEQ ID NO: 729 | QVQLVESGGGLVKPGESLRLSCAASGFTFSDYYMYWVRQAPGKGLEWVA |
| CD3/PSMA | IISDGGYYTYYSDIIKGRFTISRDNAKNSLYLQMNSLKAEDTAVYYCARGFP |
| BiTE-Fc- | LLRHGAMDYWGQGTLVTVSSGGGGSGGGGSGGGGSDIQMTQSPSSLSASV |
| BTLAecd | GDRVTITCKASQNVDTNVAWYQQKPGQAPKSLIYSASYRYSDVPSRFSGSA |
| | SGTDFTLTISSVQSEDFATYYCQQYDSYPYTFGGGTKLEIKSGGGGSEVQLV |
| | ESGGGLVQPGGSLKLSCAASGFTFNKYAMNWVRQAPGKGLEWVARIRSK |
| | YNNYATYYADSVKDRFTISRDDSKNTAYLQMNNLKTEDTAVYYCVRHGN |
| | FGNSYISYWAYWGQGTLVTVSSGGGGSGGGGSGGGGSQTVVTQEPSLTVS |
| | PGGTVTLTCGSSTGAVTSGNYPNWVQQKPGQAPRGLIGGTKFLAPGTPARF |
| | SGSLLGGKAALTLSGVQPEDEAEYYCVLWYSNRWVFGGGTKLTVLASTK |
| | GPSVFPLAPSSKSTSGGTAALGCLVKDYFPEPVTVSWNSGALTSGVHTFPA |
| | VLQSSGLYSLSSVVTVPSSSLGTQTYICNVNHKPSNTKVDKKVEPKSCDKT |
| | HTCPPCPAPELLGGPSVFLFPPKPKDTLMISRTPEVTCVVVDVSHEDPEVKF |
| | NWYVDGVEVHNAKTKPREEQYNSTYRVVSVLTVLHQDWLNGKEYKCKV |
| | SNKALPAPIEKTISKAKGQPREPQVYTLPPSREEMTKNQVSLTCLVKGFYPS |
| | DIAVEWESNGQPENNYKTTPPVLDSDGSFFLYSKLTVDKSRWQQGNVFSCS |
| | VMHEALHNHYTQKSLSLSPGKGGGGSGGGGSGGGGSKESCDVQLYIKRQS |
| | EHSILAGDPFELECPVKYCANRPHVTWCKLNGTTCVKLEDRQTSWKEEKNI |
| | SFFILHFEPVLPNDNGSYRCSANFQSNLIESHSTTLYVTDVKSASERPSKDEM |
| | AS |
| SEQ ID NO: 730 | QVQLVESGGGLVKPGESLRLSCAASGFTFSDYYMYWVRQAPGKGLEWVA |
| CD3/PSMA | IISDGGYYTYYSDIIKGRFTISRDNAKNSLYLQMNSLKAEDTAVYYCARGFP |
| BiTE-BTLAecd | LLRHGAMDYWGQGTLVTVSSGGGGSGGGGSGGGGSDIQMTQSPSSLSASV |
| | GDRVTITCKASQNVDTNVAWYQQKPGQAPKSLIYSASYRYSDVPSRFSGSA |
| | SGTDFTLTISSVQSEDFATYYCQQYDSYPYTFGGGTKLEIKSGGGGSEVQLV |
| | ESGGGLVQPGGSLKLSCAASGFTFNKYAMNWVRQAPGKGLEWVARIRSK |
| | YNNYATYYADSVKDRFTISRDDSKNTAYLQMNNLKTEDTAVYYCVRHGN |
| | FGNSYISYWAYWGQGTLVTVSSGGGGSGGGGSGGGGSQTVVTQEPSLTVS |
| | PGGTVTLTCGSSTGAVTSGNYPNWVQQKPGQAPRGLIGGTKFLAPGTPARF |
| | SGSLLGGKAALTLSGVQPEDEAEYYCVLWYSNRWVFGGGTKLTVLGGGG |
| | SGGGGSGGGGSKESCDVQLYIKRQSEHSILAGDPFELECPVKYCANRPHVT |
| | WCKLNGTTCVKLEDRQTSWKEEKNISFFILHFEPVLPNDNGSYRCSANFQS |
| | NLIESHSTTLYVTDVKSASERPSKDEMASHHHHHH |
| SEQ ID NO: 731 | DIQLTQSPASLAVSLGQRATISCKASQSVDYDGDSYLNWYQQIPGQPPKLLI |
| CD3/CD19 | YDASNLVSGIPPRFSGSGSGTDFTLNIHPVEKVDAATYHCQQSTEDPWTFG |
| BiTE-Fc-PD1ecd | GGTKLEIKGGGGSGGGGSGGGGSQVQLQQSGAELVRPGSSVKISCKASGY |
| | AFSSYWMNWVKQRPGQGLEWIGQIWPGDGDTNYNGKFKGKATLTADESS |
| | STAYMQLSSLASEDSAVYFCARRETTTVGRYYYAMDYWGQGTTVTVSSG |
| | GGGSDIKLQQSGAELARPGASVKMSCKTSGYTFTRYTMHWVKQRPGQGL |
| | EWIGYINPSRGYTNYNQKFKDKATLTTDKSSSTAYMQLSSLTSEDSAVYYC |
| | ARYYDDHYCLDYWGQGTTLTVSSVEGGSGGSGGSGGSGGVDDIQLTQSPA |
| | IMSASPGEKVTMTCRASSSVSYMNWYQQKSGTSPKRWIYDTSKVASGVPY |
| | RFSGSGSGTSYSLTISSMEAEDAATYYCQQWSSNPLTFGAGTKLELKASTK |
| | GPSVFPLAPSSKSTSGGTAALGCLVKDYFPEPVTVSWNSGALTSGVHTFPA |
| | VLQSSGLYSLSSVVTVPSSSLGTQTYICNVNHKPSNTKVDKKVEPKSCDKT |
| | HTCPPCPAPELLGGPSVFLFPPKPKDTLMISRTPEVTCVVVDVSHEDPEVKF |
| | NWYVDGVEVHNAKTKPREEQYNSTYRVVSVLTVLHQDWLNGKEYKCKV |
| | SNKALPAPIEKTISKAKGQPREPQVYTLPPSREEMTKNQVSLTCLVKGFYPS |
| | DIAVEWESNGQPENNYKTTPPVLDSDGSFFLYSKLTVDKSRWQQGNVFSCS |
| | VMHEALHNHYTQKSLSLSPGKGGGGSGGGGSGGGGSPGWFLDSPDRPWN |
| | PPTFSPALLVVTEGDNATFTCSFSNTSESFVLNWYRMSPSNQTDKLAAFPED |
| | RSQPGQDCRFRVTQLPNGRDFHMSVVRARRNDSGTYLCGAISLAPKAQIKE |
| | SLRAELRVTERRAEVPTAHPSPSPRPAGQFQTLV |
| SEQ ID NO: 732 | DIQLTQSPASLAVSLGQRATISCKASQSVDYDGDSYLNWYQQIPGQPPKLLI |
| CD3/CD19 | YDASNLVSGIPPRFSGSGSGTDFTLNIHPVEKVDAATYHCQQSTEDPWTFG |
| BiTE-PD1ecd | GGTKLEIKGGGGSGGGGSGGGGSQVQLQQSGAELVRPGSSVKISCKASGY |
| | AFSSYWMNWVKQRPGQGLEWIGQIWPGDGDTNYNGKFKGKATLTADESS |
| | STAYMQLSSLASEDSAVYFCARRETTTVGRYYYAMDYWGQGTTVTVSSG |
| | GGGSDIKLQQSGAELARPGASVKMSCKTSGYTFTRYTMHWVKQRPGQGL |
| | EWIGYINPSRGYTNYNQKFKDKATLTTDKSSSTAYMQLSSLTSEDSAVYYC |
| | ARYYDDHYCLDYWGQGTTLTVSSVEGGSGGSGGSGGSGGVDDIQLTQSPA |
| | IMSASPGEKVTMTCRASSSVSYMNWYQQKSGTSPKRWIYDTSKVASGVPY |
| | RFSGSGSGTSYSLTISSMEAEDAATYYCQQWSSNPLTFGAGTKLELKGGGG |
| | SGGGGSGGGGSPGWFLDSPDRPWNPPTFSPALLVVTEGDNATFTCSFSNTS |
| | ESFVLNWYRMSPSNQTDKLAAFPEDRSQPGQDCRFRVTQLPNGRDFHMSV |
| | VRARRNDSGTYLCGAISLAPKAQIKESLRAELRVTERRAEVPTAHPSPSPRP |
| | AGQFQTLVHHHHHH |
| SEQ ID NO: 733 | QVQLVESGGGLVKPGESLRLSCAASGFTFSDYYMYWVRQAPGKGLEWVA |
| CD3/PSMA | IISDGGYYTYYSDIIKGRFTISRDNAKNSLYLQMNSLKAEDTAVYYCARGFP |
| BiTE-Fc-PD1ecd | LLRHGAMDYWGQGTLVTVSSGGGGSGGGGSGGGGSDIQMTQSPSSLSASV |
| | GDRVTITCKASQNVDTNVAWYQQKPGQAPKSLIYSASYRYSDVPSRFSGSA |
| | SGTDFTLTISSVQSEDFATYYCQQYDSYPYTFGGGTKLEIKSGGGGSEVQLV |
| | ESGGGLVQPGGSLKLSCAASGFTFNKYAMNWVRQAPGKGLEWVARIRSK |
| | YNNYATYYADSVKDRFTISRDDSKNTAYLQMNNLKTEDTAVYYCVRHGN |
| | FGNSYISYWAYWGQGTLVTVSSGGGGSGGGGSGGGGSQTVVTQEPSLTVS |
| | PGGTVTLTCGSSTGAVTSGNYPNWVQQKPGQAPRGLIGGTKFLAPGTPARF |
| | SGSLLGGKAALTLSGVQPEDEAEYYCVLWYSNRWVFGGGTKLTVLASTK |
| | GPSVFPLAPSSKSTSGGTAALGCLVKDYFPEPVTVSWNSGALTSGVHTFPA |
| | VLQSSGLYSLSSVVTVPSSSLGTQTYICNVNHKPSNTKVDKKVEPKSCDKT |
| | HTCPPCPAPELLGGPSVFLFPPKPKDTLMISRTPEVTCVVVDVSHEDPEVKF |
| | NWYVDGVEVHNAKTKPREEQYNSTYRVVSVLTVLHQDWLNGKEYKCKV |
| | SNKALPAPIEKTISKAKGQPREPQVYTLPPSREEMTKNQVSLTCLVKGFYPS |
| | DIAVEWESNGQPENNYKTTPPVLDSDGSFFLYSKLTVDKSRWQQGNVFSCS |
| | VMHEALHNHYTQKSLSLSPGKGGGGSGGGGSGGGGSPGWFLDSPDRPWN |
| | PPTFSPALLVVTEGDNATFTCSFSNTSESFVLNWYRMSPSNQTDKLAAFPED |
| | RSQPGQDCRFRVTQLPNGRDFHMSVVRARRNDSGTYLCGAISLAPKAQIKE |
| | SLRAELRVTERRAEVPTAHPSPSPRPAGQFQTLV |
| SEQ ID NO: 734 | QVQLVESGGGLVKPGESLRLSCAASGFTFSDYYMYWVRQAPGKGLEWVA |
| CD3/PSMA | IISDGGYYTYYSDIIKGRFTISRDNAKNSLYLQMNSLKAEDTAVYYCARGFP |
| BiTE-PD1ecd | LLRHGAMDYWGQGTLVTVSSGGGGSGGGGSGGGGSDIQMTQSPSSLSASV |
| | GDRVTITCKASQNVDTNVAWYQQKPGQAPKSLIYSASYRYSDVPSRFSGSA |
| | SGTDFTLTISSVQSEDFATYYCQQYDSYPYTFGGGTKLEIKSGGGGSEVQLV |
| | ESGGGLVQPGGSLKLSCAASGFTFNKYAMNWVRQAPGKGLEWVARIRSK |
| | YNNYATYYADSVKDRFTISRDDSKNTAYLQMNNLKTEDTAVYYCVRHGN |
| | FGNSYISYWAYWGQGTLVTVSSGGGGSGGGGSGGGGSQTVVTQEPSLTVS |
| | PGGTVTLTCGSSTGAVTSGNYPNWVQQKPGQAPRGLIGGTKFLAPGTPARF |
| | SGSLLGGKAALTLSGVQPEDEAEYYCVLWYSNRWVFGGGTKLTVLGGGG |
| | SGGGGSGGGGSPGWFLDSPDRPWNPPTFSPALLVVTEGDNATFTCSFSNTS |
| | ESFVLNWYRMSPSNQTDKLAAFPEDRSQPGQDCRFRVTQLPNGRDFHMSV |
| | VRARRNDSGTYLCGAISLAPKAQIKESLRAELRVTERRAEVPTAHPSPSPRP |
| | AGQFQTLVHHHHHH |
| SEQ ID NO: 735 | DIQLTQSPASLAVSLGQRATISCKASQSVDYDGDSYLNWYQQIPGQPPKLLI |
| CD3/CD19 | YDASNLVSGIPPRFSGSGSGTDFTLNIHPVEKVDAATYHCQQSTEDPWTFG |
| BiTE-Fc- | GGTKLEIKGGGGSGGGGSGGGGSQVQLQQSGAELVRPGSSVKISCKASGY |
| SIGLEC10ecd | AFSSYWMNWVKQRPGQGLEWIGQIWPGDGDTNYNGKFKGKATLTADESS |
| | STAYMQLSSLASEDSAVYFCARRETTTVGRYYYAMDYWGQGTTVTVSSG |
| | GGGSDIKLQQSGAELARPGASVKMSCKTSGYTFTRYTMHWVKQRPGQGL |
| | EWIGYINPSRGYTNYNQKFKDKATLTTDKSSSTAYMQLSSLTSEDSAVYYC |
| | ARYYDDHYCLDYWGQGTTLTVSSVEGGSGGSGGSGGSGGVDDIQLTQSPA |
| | IMSASPGEKVTMTCRASSSVSYMNWYQQKSGTSPKRWIYDTSKVASGVPY |
| | RFSGSGSGTSYSLTISSMEAEDAATYYCQQWSSNPLTFGAGTKLELKASTK |
| | GPSVFPLAPSSKSTSGGTAALGCLVKDYFPEPVTVSWNSGALTSGVHTFPA |
| | VLQSSGLYSLSSVVTVPSSSLGTQTYICNVNHKPSNTKVDKKVEPKSCDKT |
| | HTCPPCPAPELLGGPSVFLFPPKPKDTLMISRTPEVTCVVVDVSHEDPEVKF |
| | NWYVDGVEVHNAKTKPREEQYNSTYRVVSVLTVLHQDWLNGKEYKCKV |
| | SNKALPAPIEKTISKAKGQPREPQVYTLPPSREEMTKNQVSLTCLVKGFYPS |
| | DIAVEWESNGQPENNYKTTPPVLDSDGSFFLYSKLTVDKSRWQQGNVFSCS |
| | VMHEALHNHYTQKSLSLSPGKGGGGSGGGGSGGGGSMDGRFWIRVQESV |
| | MVPEGLCISVPCSFSYPRQDWTGSTPAYGYWFKAVTETTKGAPVATNHQS |
| | REVEMSTRGRFQLTGDPAKGNCSLVIRDAQMQDESQYFFRVERGSYVRYN |
| | FMNDGFFLKVTALTQKPDVYIPETLEPGQPVTVICVFNWAFEECPPPSFSWT |
| | GAALSSQGTKPTTSHFSVLSFTPRPQDHNTDLTCHVDFSRKGVSAQRTVRL |
| | RVAYAPRDLVISISRDNTPALEPQPQGNVPYLEAQKGQFLRLLCAADSQPP |
| | ATLSWVLQNRVLSSSHPWGPRPLGLELPGVKAGDSGRYTCRAENRLGSQQ |
| | RALDLSVQYPPENLRVMVSQANRTVLENLGNGTSLPVLEGQSLCLVCVTH |
| | SSPPARLSWTQRGQVLSPSQPSDPGVLELPRVQVEHEGEFTCHARHPLGSQ |
| | HVSLSLSVHYSPKLLGPSCSWEAEGLHCSCSSQASPAPSLRWWLGEELLEG |
| | NSSQDSFEVTPSSAGPWANSSLSLHGGLSSGLRLRCEAWNVHGAQSGSILQ |
| | LPDKKGLIST |
| SEQ ID NO: 736 | DIQLTQSPASLAVSLGQRATISCKASQSVDYDGDSYLNWYQQIPGQPPKLLI |
| CD3/CD19 | YDASNLVSGIPPRFSGSGSGTDFTLNIHPVEKVDAATYHCQQSTEDPWTFG |
| BiTE- | GGTKLEIKGGGGSGGGGSGGGGSQVQLQQSGAELVRPGSSVKISCKASGY |
| SIGLEC10ecd | AFSSYWMNWVKQRPGQGLEWIGQIWPGDGDTNYNGKFKGKATLTADESS |
| | STAYMQLSSLASEDSAVYFCARRETTTVGRYYYAMDYWGQGTTVTVSSG |
| | GGGSDIKLQQSGAELARPGASVKMSCKTSGYTFTRYTMHWVKQRPGQGL |
| | EWIGYINPSRGYTNYNQKFKDKATLTTDKSSSTAYMQLSSLTSEDSAVYYC |
| | ARYYDDHYCLDYWGQGTTLTVSSVEGGSGGSGGSGGSGGVDDIQLTQSPA |
| | IMSASPGEKVTMTCRASSSVSYMNWYQQKSGTSPKRWIYDTSKVASGVPY |
| | RFSGSGSGTSYSLTISSMEAEDAATYYCQQWSSNPLTFGAGTKLELKGGGG |
| | SGGGGSGGGGSMDGRFWIRVQESVMVPEGLCISVPCSFSYPRQDWTGSTP |
| | AYGYWFKAVTETTKGAPVATNHQSREVEMSTRGRFQLTGDPAKGNCSLVI |
| | RDAQMQDESQYFFRVERGSYVRYNFMNDGFFLKVTALTQKPDVYIPETLE |
| | PGQPVTVICVFNWAFEECPPPSFSWTGAALSSQGTKPTTSHFSVLSFTPRPQ |
| | DHNTDLTCHVDFSRKGVSAQRTVRLRVAYAPRDLVISISRDNTPALEPQPQ |
| | GNVPYLEAQKGQFLRLLCAADSQPPATLSWVLQNRVLSSSHPWGPRPLGL |
| | ELPGVKAGDSGRYTCRAENRLGSQQRALDLSVQYPPENLRVMVSQANRTV |
| | LENLGNGTSLPVLEGQSLCLVCVTHSSPPARLSWTQRGQVLSPSQPSDPGV |
| | LELPRVQVEHEGEFTCHARHPLGSQHVSLSLSVHYSPKLLGPSCSWEAEGL |
| | HCSCSSQASPAPSLRWWLGEELLEGNSSQDSFEVTPSSAGPWANSSLSLHG |
| | GLSSGLRLRCEAWNVHGAQSGSILQLPDKKGLISTHHHHHH |
| SEQ ID NO: 737 | QVQLVESGGGLVKPGESLRLSCAASGFTFSDYYMYWVRQAPGKGLEWVA |
| CD3/PSMA | IISDGGYYTYYSDIIKGRFTISRDNAKNSLYLQMNSLKAEDTAVYYCARGFP |
| BiTE-Fc- | LLRHGAMDYWGQGTLVTVSSGGGGSGGGGSGGGGSDIQMTQSPSSLSASV |
| SIGLEC10ecd | GDRVTITCKASQNVDTNVAWYQQKPGQAPKSLIYSASYRYSDVPSRFSGSA |
| | SGTDFTLTISSVQSEDFATYYCQQYDSYPYTFGGGTKLEIKSGGGGSEVQLV |
| | ESGGGLVQPGGSLKLSCAASGFTFNKYAMNWVRQAPGKGLEWVARIRSK |
| | YNNYATYYADSVKDRFTISRDDSKNTAYLQMNNLKTEDTAVYYCVRHGN |
| | FGNSYISYWAYWGQGTLVTVSSGGGGSGGGGSGGGGSQTVVTQEPSLTVS |
| | PGGTVTLTCGSSTGAVTSGNYPNWVQQKPGQAPRGLIGGTKFLAPGTPARF |
| | SGSLLGGKAALTLSGVQPEDEAEYYCVLWYSNRWVFGGGTKLTVLASTK |
| | GPSVFPLAPSSKSTSGGTAALGCLVKDYFPEPVTVSWNSGALTSGVHTFPA |
| | VLQSSGLYSLSSVVTVPSSSLGTQTYICNVNHKPSNTKVDKKVEPKSCDKT |
| | HTCPPCPAPELLGGPSVFLFPPKPKDTLMISRTPEVTCVVVDVSHEDPEVKF |
| | NWYVDGVEVHNAKTKPREEQYNSTYRVVSVLTVLHQDWLNGKEYKCKV |
| | SNKALPAPIEKTISKAKGQPREPQVYTLPPSREEMTKNQVSLTCLVKGFYPS |
| | DIAVEWESNGQPENNYKTTPPVLDSDGSFFLYSKLTVDKSRWQQGNVFSCS |
| | VMHEALHNHYTQKSLSLSPGKGGGGSGGGGSGGGGSMDGRFWIRVQESV |
| | MVPEGLCISVPCSFSYPRQDWTGSTPAYGYWFKAVTETTKGAPVATNHQS |
| | REVEMSTRGRFQLTGDPAKGNCSLVIRDAQMQDESQYFFRVERGSYVRYN |
| | FMNDGFFLKVTALTQKPDVYIPETLEPGQPVTVICVFNWAFEECPPPSFSWT |
| | GAALSSQGTKPTTSHFSVLSFTPRPQDHNTDLTCHVDFSRKGVSAQRTVRL |
| | RVAYAPRDLVISISRDNTPALEPQPQGNVPYLEAQKGQFLRLLCAADSQPP |
| | ATLSWVLQNRVLSSSHPWGPRPLGLELPGVKAGDSGRYTCRAENRLGSQQ |
| | RALDLSVQYPPENLRVMVSQANRTVLENLGNGTSLPVLEGQSLCLVCVTH |
| | SSPPARLSWTQRGQVLSPSQPSDPGVLELPRVQVEHEGEFTCHARHPLGSQ |
| | HVSLSLSVHYSPKLLGPSCSWEAEGLHCSCSSQASPAPSLRWWLGEELLEG |
| | NSSQDSFEVTPSSAGPWANSSLSLHGGLSSGLRLRCEAWNVHGAQSGSILQ |
| | LPDKKGLIST |
| SEQ ID NO: 738 | QVQLVESGGGLVKPGESLRLSCAASGFTFSDYYMYWVRQAPGKGLEWVA |
| CD3/PSMA | IISDGGYYTYYSDIIKGRFTISRDNAKNSLYLQMNSLKAEDTAVYYCARGFP |
| BiTE- | LLRHGAMDYWGQGTLVTVSSGGGGSGGGGSGGGGSDIQMTQSPSSLSASV |
| SIGLEC10ecd | GDRVTITCKASQNVDTNVAWYQQKPGQAPKSLIYSASYRYSDVPSRFSGSA |
| | SGTDFTLTISSVQSEDFATYYCQQYDSYPYTFGGGTKLEIKSGGGGSEVQLV |
| | ESGGGLVQPGGSLKLSCAASGFTFNKYAMNWVRQAPGKGLEWVARIRSK |
| | YNNYATYYADSVKDRFTISRDDSKNTAYLQMNNLKTEDTAVYYCVRHGN |
| | FGNSYISYWAYWGQGTLVTVSSGGGGSGGGGSGGGGSQTVVTQEPSLTVS |
| | PGGTVTLTCGSSTGAVTSGNYPNWVQQKPGQAPRGLIGGTKFLAPGTPARF |
| | SGSLLGGKAALTLSGVQPEDEAEYYCVLWYSNRWVFGGGTKLTVLGGGG |
| | SGGGGSGGGGSMDGRFWIRVQESVMVPEGLCISVPCSFSYPRQDWTGSTP |
| | AYGYWFKAVTETTKGAPVATNHQSREVEMSTRGRFQLTGDPAKGNCSLVI |
| | RDAQMQDESQYFFRVERGSYVRYNFMNDGFFLKVTALTQKPDVYIPETLE |
| | PGQPVTVICVFNWAFEECPPPSFSWTGAALSSQGTKPTTSHFSVLSFTPRPQ |
| | DHNTDLTCHVDFSRKGVSAQRTVRLRVAYAPRDLVISISRDNTPALEPQPQ |
| | GNVPYLEAQKGQFLRLLCAADSQPPATLSWVLQNRVLSSSHPWGPRPLGL |
| | ELPGVKAGDSGRYTCRAENRLGSQQRALDLSVQYPPENLRVMVSQANRTV |
| | LENLGNGTSLPVLEGQSLCLVCVTHSSPPARLSWTQRGQVLSPSQPSDPGV |
| | LELPRVQVEHEGEFTCHARHPLGSQHVSLSLSVHYSPKLLGPSCSWEAEGL |
| | HCSCSSQASPAPSLRWWLGEELLEGNSSQDSFEVTPSSAGPWANSSLSLHG |
| | GLSSGLRLRCEAWNVHGAQSGSILQLPDKKGLISTHHHHHH |
| SEQ ID NO: 739 | DIQLTQSPASLAVSLGQRATISCKASQSVDYDGDSYLNWYQQIPGQPPKLLI |
| CD3/CD19 | YDASNLVSGIPPRFSGSGSGTDFTLNIHPVEKVDAATYHCQQSTEDPWTFG |
| BiTE-Fc- | GGTKLEIKGGGGSGGGGSGGGGSQVQLQQSGAELVRPGSSVKISCKASGY |
| SIRPaecd | AFSSYWMNWVKQRPGQGLEWIGQIWPGDGDTNYNGKFKGKATLTADESS |
| | STAYMQLSSLASEDSAVYFCARRETTTVGRYYYAMDYWGQGTTVTVSSG |
| | GGGSDIKLQQSGAELARPGASVKMSCKTSGYTFTRYTMHWVKQRPGQGL |
| | EWIGYINPSRGYTNYNQKFKDKATLTTDKSSSTAYMQLSSLTSEDSAVYYC |
| | ARYYDDHYCLDYWGQGTTLTVSSVEGGSGGSGGSGGSGGVDDIQLTQSPA |
| | IMSASPGEKVTMTCRASSSVSYMNWYQQKSGTSPKRWIYDTSKVASGVPY |
| | RFSGSGSGTSYSLTISSMEAEDAATYYCQQWSSNPLTFGAGTKLELKASTK |
| | GPSVFPLAPSSKSTSGGTAALGCLVKDYFPEPVTVSWNSGALTSGVHTFPA |
| | VLQSSGLYSLSSVVTVPSSSLGTQTYICNVNHKPSNTKVDKKVEPKSCDKT |
| | HTCPPCPAPELLGGPSVFLFPPKPKDTLMISRTPEVTCVVVDVSHEDPEVKF |
| | NWYVDGVEVHNAKTKPREEQYNSTYRVVSVLTVLHQDWLNGKEYKCKV |
| | SNKALPAPIEKTISKAKGQPREPQVYTLPPSREEMTKNQVSLTCLVKGFYPS |
| | DIAVEWESNGQPENNYKTTPPVLDSDGSFFLYSKLTVDKSRWQQGNVFSCS |
| | VMHEALHNHYTQKSLSLSPGKGGGGSGGGGSGGGGSEEELQVIQPDKSVL |
| | VAAGETATLRCTATSLIPVGPIQWFRGAGPGRELIYNQKEGHFPRVTTVSDL |
| | TKRNNMDFSIRIGNITPADAGTYYCVKFRKGSPDDVEFKSGAGTELSVRAK |
| | PS |
| SEQ ID NO: 740 | DIQLTQSPASLAVSLGQRATISCKASQSVDYDGDSYLNWYQQIPGQPPKLLI |
| CD3/CD19 | YDASNLVSGIPPRFSGSGSGTDFTLNIHPVEKVDAATYHCQQSTEDPWTFG |
| BiTE-SIRPaecd | GGTKLEIKGGGGSGGGGSGGGGSQVQLQQSGAELVRPGSSVKISCKASGY |
| | AFSSYWMNWVKQRPGQGLEWIGQIWPGDGDTNYNGKFKGKATLTADESS |
| | STAYMQLSSLASEDSAVYFCARRETTTVGRYYYAMDYWGQGTTVTVSSG |
| | GGGSDIKLQQSGAELARPGASVKMSCKTSGYTFTRYTMHWVKQRPGQGL |
| | EWIGYINPSRGYTNYNQKFKDKATLTTDKSSSTAYMQLSSLTSEDSAVYYC |
| | ARYYDDHYCLDYWGQGTTLTVSSVEGGSGGSGGSGGSGGVDDIQLTQSPA |
| | IMSASPGEKVTMTCRASSSVSYMNWYQQKSGTSPKRWIYDTSKVASGVPY |
| | RFSGSGSGTSYSLTISSMEAEDAATYYCQQWSSNPLTFGAGTKLELKGGGG |
| | SGGGGSGGGGSEEELQVIQPDKSVLVAAGETATLRCTATSLIPVGPIQWFRG |
| | AGPGRELIYNQKEGHFPRVTTVSDLTKRNNMDFSIRIGNITPADAGTYYCV |
| | KFRKGSPDDVEFKSGAGTELSVRAKPSHHHHHH |
| SEQ ID NO: 741 | QVQLVESGGGLVKPGESLRLSCAASGFTFSDYYMYWVRQAPGKGLEWVA |
| CD3/PSMA | IISDGGYYTYYSDIIKGRFTISRDNAKNSLYLQMNSLKAEDTAVYYCARGFP |
| BiTE-Fc- | LLRHGAMDYWGQGTLVTVSSGGGGSGGGGSGGGGSDIQMTQSPSSLSASV |
| SIRPaecd | GDRVTITCKASQNVDTNVAWYQQKPGQAPKSLIYSASYRYSDVPSRFSGSA |
| | SGTDFTLTISSVQSEDFATYYCQQYDSYPYTFGGGTKLEIKSGGGGSEVQLV |
| | ESGGGLVQPGGSLKLSCAASGFTFNKYAMNWVRQAPGKGLEWVARIRSK |
| | YNNYATYYADSVKDRFTISRDDSKNTAYLQMNNLKTEDTAVYYCVRHGN |
| | FGNSYISYWAYWGQGTLVTVSSGGGGSGGGGSGGGGSQTVVTQEPSLTVS |
| | PGGTVTLTCGSSTGAVTSGNYPNWVQQKPGQAPRGLIGGTKFLAPGTPARF |
| | SGSLLGGKAALTLSGVQPEDEAEYYCVLWYSNRWVFGGGTKLTVLASTK |
| | GPSVFPLAPSSKSTSGGTAALGCLVKDYFPEPVTVSWNSGALTSGVHTFPA |
| | VLQSSGLYSLSSVVTVPSSSLGTQTYICNVNHKPSNTKVDKKVEPKSCDKT |
| | HTCPPCPAPELLGGPSVFLFPPKPKDTLMISRTPEVTCVVVDVSHEDPEVKF |
| | NWYVDGVEVHNAKTKPREEQYNSTYRVVSVLTVLHQDWLNGKEYKCKV |
| | SNKALPAPIEKTISKAKGQPREPQVYTLPPSREEMTKNQVSLTCLVKGFYPS |
| | DIAVEWESNGQPENNYKTTPPVLDSDGSFFLYSKLTVDKSRWQQGNVFSCS |
| | VMHEALHNHYTQKSLSLSPGKGGGGSGGGGSGGGGSEEELQVIQPDKSVL |
| | VAAGETATLRCTATSLIPVGPIQWFRGAGPGRELIYNQKEGHFPRVTTVSDL |
| | TKRNNMDFSIRIGNITPADAGTYYCVKFRKGSPDDVEFKSGAGTELSVRAK |
| | PS |
| SEQ ID NO: 742 | QVQLVESGGGLVKPGESLRLSCAASGFTFSDYYMYWVRQAPGKGLEWVA |
| CD3/PSMA | IISDGGYYTYYSDIIKGRFTISRDNAKNSLYLQMNSLKAEDTAVYYCARGFP |
| BiTE-SIRPaecd | LLRHGAMDYWGQGTLVTVSSGGGGSGGGGSGGGGSDIQMTQSPSSLSASV |
| | GDRVTITCKASQNVDTNVAWYQQKPGQAPKSLIYSASYRYSDVPSRFSGSA |
| | SGTDFTLTISSVQSEDFATYYCQQYDSYPYTFGGGTKLEIKSGGGGSEVQLV |
| | ESGGGLVQPGGSLKLSCAASGFTFNKYAMNWVRQAPGKGLEWVARIRSK |
| | YNNYATYYADSVKDRFTISRDDSKNTAYLQMNNLKTEDTAVYYCVRHGN |
| | FGNSYISYWAYWGQGTLVTVSSGGGGSGGGGSGGGGSQTVVTQEPSLTVS |
| | PGGTVTLTCGSSTGAVTSGNYPNWVQQKPGQAPRGLIGGTKFLAPGTPARF |
| | SGSLLGGKAALTLSGVQPEDEAEYYCVLWYSNRWVFGGGTKLTVLGGGG |
| | SGGGGSGGGGSEEELQVIQPDKSVLVAAGETATLRCTATSLIPVGPIQWFRG |
| | AGPGRELIYNQKEGHFPRVTTVSDLTKRNNMDFSIRIGNITPADAGTYYCV |
| | KFRKGSPDDVEFKSGAGTELSVRAKPSHHHHHH |
| SEQ ID NO: 743 | DIQLTQSPASLAVSLGQRATISCKASQSVDYDGDSYLNWYQQIPGQPPKLLI |
| CD3/CD19 | YDASNLVSGIPPRFSGSGSGTDFTLNIHPVEKVDAATYHCQQSTEDPWTFG |
| BiTE-Fc- | GGTKLEIKGGGGSGGGGSGGGGSQVQLQQSGAELVRPGSSVKISCKASGY |
| TIM3ecd | AFSSYWMNWVKQRPGQGLEWIGQIWPGDGDTNYNGKFKGKATLTADESS |
| | STAYMQLSSLASEDSAVYFCARRETTTVGRYYYAMDYWGQGTTVTVSSG |
| | GGGSDIKLQQSGAELARPGASVKMSCKTSGYTFTRYTMHWVKQRPGQGL |
| | EWIGYINPSRGYTNYNQKFKDKATLTTDKSSSTAYMQLSSLTSEDSAVYYC |
| | ARYYDDHYCLDYWGQGTTLTVSSVEGGSGGSGGSGGSGGVDDIQLTQSPA |
| | IMSASPGEKVTMTCRASSSVSYMNWYQQKSGTSPKRWIYDTSKVASGVPY |
| | RFSGSGSGTSYSLTISSMEAEDAATYYCQQWSSNPLTFGAGTKLELKASTK |
| | GPSVFPLAPSSKSTSGGTAALGCLVKDYFPEPVTVSWNSGALTSGVHTFPA |
| | VLQSSGLYSLSSVVTVPSSSLGTQTYICNVNHKPSNTKVDKKVEPKSCDKT |
| | HTCPPCPAPELLGGPSVFLFPPKPKDTLMISRTPEVTCVVVDVSHEDPEVKF |
| | NWYVDGVEVHNAKTKPREEQYNSTYRVVSVLTVLHQDWLNGKEYKCKV |
| | SNKALPAPIEKTISKAKGQPREPQVYTLPPSREEMTKNQVSLTCLVKGFYPS |
| | DIAVEWESNGQPENNYKTTPPVLDSDGSFFLYSKLTVDKSRWQQGNVFSCS |
| | VMHEALHNHYTQKSLSLSPGKGGGGSGGGGSGGGGSSEVEYRAEVGQNA |
| | YLPCFYTPAAPGNLVPVCWGKGACPVFECGNVVLRTDERDVNYWTSRYW |
| | LNGDFRKGDVSLTIENVTLADSGIYCCRIQIPGIMNDEKFNLKLVIKPAKVTP |
| | APTRQRDFTAAFPRMLTTRGHGPAETQTLGSLPDINLTQISTLANELRDSRL |
| | ANDLRDSGATIRIG |
| SEQ ID NO: 744 | DIQLTQSPASLAVSLGQRATISCKASQSVDYDGDSYLNWYQQIPGQPPKLLI |
| CD3/CD19 | YDASNLVSGIPPRFSGSGSGTDFTLNIHPVEKVDAATYHCQQSTEDPWTFG |
| BiTE-TIM3ecd | GGTKLEIKGGGGSGGGGSGGGGSQVQLQQSGAELVRPGSSVKISCKASGY |
| | AFSSYWMNWVKQRPGQGLEWIGQIWPGDGDTNYNGKFKGKATLTADESS |
| | STAYMQLSSLASEDSAVYFCARRETTTVGRYYYAMDYWGQGTTVTVSSG |
| | GGGSDIKLQQSGAELARPGASVKMSCKTSGYTFTRYTMHWVKQRPGQGL |
| | EWIGYINPSRGYTNYNQKFKDKATLTTDKSSSTAYMQLSSLTSEDSAVYYC |
| | ARYYDDHYCLDYWGQGTTLTVSSVEGGSGGSGGSGGSGGVDDIQLTQSPA |
| | IMSASPGEKVTMTCRASSSVSYMNWYQQKSGTSPKRWIYDTSKVASGVPY |
| | RFSGSGSGTSYSLTISSMEAEDAATYYCQQWSSNPLTFGAGTKLELKGGGG |
| | SGGGGSGGGGSSEVEYRAEVGQNAYLPCFYTPAAPGNLVPVCWGKGACP |
| | VFECGNVVLRTDERDVNYWTSRYWLNGDFRKGDVSLTIENVTLADSGIYC |
| | CRIQIPGIMNDEKFNLKLVIKPAKVTPAPTRQRDFTAAFPRMLTTRGHGPAE |
| | TQTLGSLPDINLTQISTLANELRDSRLANDLRDSGATIRIGHHHHHH |
| SEQ ID NO: 745 | QVQLVESGGGLVKPGESLRLSCAASGFTFSDYYMYWVRQAPGKGLEWVA |
| CD3/PSMA | IISDGGYYTYYSDIIKGRFTISRDNAKNSLYLQMNSLKAEDTAVYYCARGFP |
| BiTE-Fc- | LLRHGAMDYWGQGTLVTVSSGGGGSGGGGSGGGGSDIQMTQSPSSLSASV |
| TIM3ecd | GDRVTITCKASQNVDTNVAWYQQKPGQAPKSLIYSASYRYSDVPSRFSGSA |
| | SGTDFTLTISSVQSEDFATYYCQQYDSYPYTFGGGTKLEIKSGGGGSEVQLV |
| | ESGGGLVQPGGSLKLSCAASGFTFNKYAMNWVRQAPGKGLEWVARIRSK |
| | YNNYATYYADSVKDRFTISRDDSKNTAYLQMNNLKTEDTAVYYCVRHGN |
| | FGNSYISYWAYWGQGTLVTVSSGGGGSGGGGSGGGGSQTVVTQEPSLTVS |
| | PGGTVTLTCGSSTGAVTSGNYPNWVQQKPGQAPRGLIGGTKFLAPGTPARF |
| | SGSLLGGKAALTLSGVQPEDEAEYYCVLWYSNRWVFGGGTKLTVLASTK |
| | GPSVFPLAPSSKSTSGGTAALGCLVKDYFPEPVTVSWNSGALTSGVHTFPA |
| | VLQSSGLYSLSSVVTVPSSSLGTQTYICNVNHKPSNTKVDKKVEPKSCDKT |
| | HTCPPCPAPELLGGPSVFLFPPKPKDTLMISRTPEVTCVVVDVSHEDPEVKF |
| | NWYVDGVEVHNAKTKPREEQYNSTYRVVSVLTVLHQDWLNGKEYKCKV |
| | SNKALPAPIEKTISKAKGQPREPQVYTLPPSREEMTKNQVSLTCLVKGFYPS |
| | DIAVEWESNGQPENNYKTTPPVLDSDGSFFLYSKLTVDKSRWQQGNVFSCS |
| | VMHEALHNHYTQKSLSLSPGKGGGGSGGGGSGGGGSSEVEYRAEVGQNA |
| | YLPCFYTPAAPGNLVPVCWGKGACPVFECGNVVLRTDERDVNYWTSRYW |
| | LNGDFRKGDVSLTIENVTLADSGIYCCRIQIPGIMNDEKFNLKLVIKPAKVTP |
| | APTRQRDFTAAFPRMLTTRGHGPAETQTLGSLPDINLTQISTLANELRDSRL |
| | ANDLRDSGATIRIG |
| SEQ ID NO: 746 | QVQLVESGGGLVKPGESLRLSCAASGFTFSDYYMYWVRQAPGKGLEWVA |
| CD3/PSMA | IISDGGYYTYYSDIIKGRFTISRDNAKNSLYLQMNSLKAEDTAVYYCARGFP |
| BiTE-TIM3ecd | LLRHGAMDYWGQGTLVTVSSGGGGSGGGGSGGGGSDIQMTQSPSSLSASV |
| | GDRVTITCKASQNvDTNVAWYQQKPGQAPKSLIYSASYRYSDVPSRFSGSA |
| | SGTDFTLTISSVQSEDFATYYCQQYDSYPYTFGGGTKLEIKSGGGGSEVQLV |
| | ESGGGLVQPGGSLKLSCAASGFTFNKYAMNWVRQAPGKGLEWVARIRSK |
| | YNNYATYYADSVKDRFTISRDDSKNTAYLQMNNLKTEDTAVYYCVRHGN |
| | FGNSYISYWAYWGQGTLVTVSSGGGGSGGGGSGGGGSQTVVTQEPSLTVS |
| | PGGTVTLTCGSSTGAVTSGNYPNWVQQKPGQAPRGLIGGTKFLAPGTPARF |
| | SGSLLGGKAALTLSGVQPEDEAEYYCVLWYSNRWVFGGGTKLTVLGGGG |
| | SGGGGSGGGGSSEVEYRAEVGQNAYLPCFYTPAAPGNLVPVCWGKGACP |
| | VFECGNVVLRTDERDVNYWTSRYWLNGDFRKGDVSLTIENVTLADSGIYC |
| | CRIQIPGIMNDEKFNLKLVIKPAKVTPAPTRQRDFTAAFPRMLTTRGHGPAE |
| | TQTLGSLPDINLTQISTLANELRDSRLANDLRDSGATIRIGHHHHHH |
| SEQ ID NO: 747 | QVQLVQSGAEVKKPGASVKVSCKASGYTFTEFGMNWVRQAPGQGLEWM |
| a- | GWINTKTGEATYVEEFKGRVTFTTDTSTSTAYMELRSLRSDDTAVYYCAR |
| CEACAM5/CD3 | WDFAYYVEAMDYWGQGTTVTVSSASTKGPSVFPLAPSSKSTSGGTAALGC |
| HC1-BTLAecd | LVKDYFPEPVTVSWNSGALTSGVHTFPAVLQSSGLYSLSSVVTVPSSSLGTQ |
| | TYICNVNHKPSNTKVDKKVEPKSCDKTHTCPPCPAPEAAGGPSVFLFPPKP |
| | KDTLMISRTPEVTCVVVDVSHEDPEVKFNWYVDGVEVHNAKTKPREEQY |
| | NSTYRVVSVLTVLHQDWLNGKEYKCKVSNKALGAPIEKTISKAKGQPREP |
| | QVCTLPPSRDELTKNQVSLSCAVKGFYPSDIAVEWESNGQPENNYKTTPPV |
| | LDSDGSFFLVSKLTVDKSRWQQGNVFSCSVMHEALHNHYTQKSLSLSPGK |
| | GGGGSGGGGSGGGGSKESCDVQLYIKRQSEHSILAGDPFELECPVKYCANR |
| | PHVTWCKLNGTTCVKLEDRQTSWKEEKNISFFILHEEPVLPNDNGSYRCSA |
| | NFQSNLIESHSTTLYVTDVKSASERPSKDEMAS |
| SEQ ID NO: 748 | QVQLVQSGAEVKKPGASVKVSCKASGYTFTEFGMNWVRQAPGQGLEWM |
| a- | GWINTKTGEATYVEEFKGRVTFTTDTSTSTAYMELRSLRSDDTAVYYCAR |
| CEACAM5/CD3 | WDFAYYVEAMDYWGQGTTVTVSSASTKGPSVFPLAPSSKSTSGGTAALGC |
| HC2-BTLAecd | LVKDYFPEPVTVSWNSGALTSGVHTFPAVLQSSGLYSLSSVVTVPSSSLGTQ |
| | TYICNVNHKPSNTKVDKKVEPKSCDGGGGSGGGGSEVQLLESGGGLVQPG |
| | GSLRLSCAASGFTFSTYAMNWVRQAPGKGLEWVSRIRSKYNNYATYYADS |
| | VKGRFTISRDDSKNTLYLQMNSLRAEDTAVYYCVRHGNFGNSYVSWFAY |
| | WGQGTLVTVSSASVAAPSVFIFPPSDEQLKSGTASVVCLLNNFYPREAKVQ |
| | WKVDNALQSGNSQESVTEQDSKDSTYSLSSTLTLSKADYEKHKVYACEVT |
| | HQGLSSPVTKSFNRGECDKTHTCPPCPAPEAAGGPSVFLFPPKPKDTLMISR |
| | TPEVTCVVVDVSHEDPEVKFNWYVDGVEVHNAKTKPREEQYNSTYRVVS |
| | VLTVLHQDWLNGKEYKCKVSNKALGAPIEKTISKAKGQPREPQVYTLPPC |
| | RDELTKNQVSLWCLVKGFYPSDIAVEWESNGQPENNYKTTPPVLDSDGSFF |
| | LYSKLTVDKSRWQQGNVFSCSVMHEALHNHYTQKSLSLSPGKGGGGSGG |
| | GGSGGGGSKESCDVQLYIKRQSEHSILAGDPFELECPVKYCANRPHVTWCK |
| | LNGTTCVKLEDRQTSWKEEKNISFFILHEEPVLPNDNGSYRCSANFQSNLIE |
| | SHSTTLYVTDVKSASERPSKDEMAS |
| SEQ ID NO: 749 | DIQMTQSPSSLSASVGDRVTITCKASAAVGTYVAWYQQKPGKAPKLLIYSA |
| a- | SYRKRGVPSRFSGSGSGTDFTLTISSLQPEDFATYYCHQYYTYPLFTFGQGT |
| CEACAM5/CD3 | KLEIKRTVAAPSVFIFPPSDEQLKSGTASVVCLLNNFYPREAKVQWKVDNA |
| LC1-BTLAecd | LQSGNSQESVTEQDSKDSTYSLSSTLTLSKADYEKHKVYACEVTHQGLSSP |
| | VTKSFNRGECGGGGSGGGGSGGGGSKESCDVQLYIKRQSEHSILAGDPFEL |
| | ECPVKYCANRPHVTWCKLNGTTCVKLEDRQTSWKEEKNISFFILHFEPVLP |
| | NDNGSYRCSANFQSNLIESHSTTLYVTDVKSASERPSKDEMAS |
| SEQ ID NO: 750 | QAVVTQEPSLTVSPGGTVTLTCGSSTGAVTTSNYANWVQEKPGQAFRGLIG |
| a- | GTNKRAPGTPARFSGSLLGGKAALTLSGAQPEDEAEYYCALWYSNLWVFG |
| CEACAM5/CD3 | GGTKLTVLSSASTKGPSVFPLAPSSKSTSGGTAALGCLVKDYFPEPVTVSW |
| LC2-BTLAecd | NSGALTSGVHTFPAVLQSSGLYSLSSVVTVPSSSLGTQTYICNVNHKPSNTK |
| | VDKKVEPKSCGGGGSGGGGSGGGGSKESCDVQLYIKRQSEHSILAGDPFEL |
| | ECPVKYCANRPHVTWCKLNGTTCVKLEDRQTSWKEEKNISFFILHFEPVLP |
| | NDNGSYRCSANFQSNLIESHSTTLYVTDVKSASERPSKDEMAS |
| SEQ ID NO: 751 | QVQLVQSGAEVKKPGASVKVSCKASGYTFTEFGMNWVRQAPGQGLEWM |
| a- | GWINTKTGEATYVEEFKGRVTFTTDTSTSTAYMELRSLRSDDTAVYYCAR |
| CEACAM5/CD3 | WDFAYYVEAMDYWGQGTTVTVSSASTKGPSVFPLAPSSKSTSGGTAALGC |
| HC1-PD1ecd | LVKDYFPEPVTVSWNSGALTSGVHTFPAVLQSSGLYSLSSVVTVPSSSLGTQ |
| | TYICNVNHKPSNTKVDKKVEPKSCDKTHTCPPCPAPEAAGGPSVFLFPPKP |
| | KDTLMISRTPEVTCVVVDVSHEDPEVKFNWYVDGVEVHNAKTKPREEQY |
| | NSTYRVVSVLTVLHQDWLNGKEYKCKVSNKALGAPIEKTISKAKGQPREP |
| | QVCTLPPSRDELTKNQVSLSCAVKGFYPSDIAVEWESNGQPENNYKTTPPV |
| | LDSDGSFFLVSKLTVDKSRWQQGNVFSCSVMHEALHNHYTQKSLSLSPGK |
| | GGGGSGGGGSGGGGSPGWFLDSPDRPWNPPTFSPALLVVTEGDNATFTCSF |
| | SNTSESFVLNWYRMSPSNQTDKLAAFPEDRSQPGQDCRFRVTQLPNGRDF |
| | HMSVVRARRNDSGTYLCGAISLAPKAQIKESLRAELRVTERRAEVPTAHPS |
| | PSPRPAGQFQTLV |
| SEQ ID NO: 752 | QVQLVQSGAEVKKPGASVKVSCKASGYTFTEFGMNWVRQAPGQGLEWM |
| a- | GWINTKTGEATYVEEFKGRVTFTTDTSTSTAYMELRSLRSDDTAVYYCAR |
| CEACAM5/CD3 | WDFAYYVEAMDYWGQGTTVTVSSASTKGPSVFPLAPSSKSTSGGTAALGC |
| HC2-PD1ecd | LVKDYFPEPVTVSWNSGALTSGVHTFPAVLQSSGLYSLSSVVTVPSSSLGTQ |
| | TYICNVNHKPSNTKVDKKVEPKSCDGGGGSGGGGSEVQLLESGGGLVQPG |
| | GSLRLSCAASGFTFSTYAMNWVRQAPGKGLEWVSRIRSKYNNYATYYADS |
| | VKGRFTISRDDSKNTLYLQMNSLRAEDTAVYYCVRHGNFGNSYVSWFAY |
| | WGQGTLVTVSSASVAAPSVFIFPPSDEQLKSGTASVVCLLNNFYPREAKVQ |
| | WKVDNALQSGNSQESVTEQDSKDSTYSLSSTLTLSKADYEKHKVYACEVT |
| | HQGLSSPVTKSFNRGECDKTHTCPPCPAPEAAGGPSVFLFPPKPKDTLMISR |
| | TPEVTCVVVDVSHEDPEVKFNWYVDGVEVHNAKTKPREEQYNSTYRVVS |
| | VLTVLHQDWLNGKEYKCKVSNKALGAPIEKTISKAKGQPREPQVYTLPPC |
| | RDELTKNQVSLWCLVKGFYPSDIAVEWESNGQPENNYKTTPPVLDSDGSFF |
| | LYSKLTVDKSRWQQGNVFSCSVMHEALHNHYTQKSLSLSPGKGGGGSGG |
| | GGSGGGGSPGWFLDSPDRPWNPPTFSPALLVVTEGDNATFTCSFSNTSESFV |
| | LNWYRMSPSNQTDKLAAFPEDRSQPGQDCRFRVTQLPNGRDFHMSVVRA |
| | RRNDSGTYLCGAISLAPKAQIKESLRAELRVTERRAEVPTAHPSPSPRPAGQ |
| | FQTLV |
| SEQ ID NO: 753 | DIQMTQSPSSLSASVGDRVTITCKASAAVGTYVAWYQQKPGKAPKLLIYSA |
| a- | SYRKRGVPSRFSGSGSGTDFTLTISSLQPEDFATYYCHQYYTYPLFTFGQGT |
| CEACAM5/CD3 | KLEIKRTVAAPSVFIFPPSDEQLKSGTASVVCLLNNFYPREAKVQWKVDNA |
| LC1-PD1ecd | LQSGNSQESVTEQDSKDSTYSLSSTLTLSKADYEKHKVYACEVTHQGLSSP |
| | VTKSFNRGECGGGGSGGGGSGGGGSPGWFLDSPDRPWNPPTFSPALLVVT |
| | EGDNATFTCSFSNTSESFVLNWYRMSPSNQTDKLAAFPEDRSQPGQDCRFR |
| | VTQLPNGRDFHMSVVRARRNDSGTYLCGAISLAPKAQIKESLRAELRVTER |
| | RAEVPTAHPSPSPRPAGQFQTLV |
| SEQ ID NO: 754 | QAVVTQEPSLTVSPGGTVTLTCGSSTGAVTTSNYANWVQEKPGQAFRGLIG |
| a- | GTNKRAPGTPARFSGSLLGGKAALTLSGAQPEDEAEYYCALWYSNLWVFG |
| CEACAM5/CD3 | GGTKLTVLSSASTKGPSVFPLAPSSKSTSGGTAALGCLVKDYFPEPVTVSW |
| LC2-PD1ecd | NSGALTSGVHTFPAVLQSSGLYSLSSVVTVPSSSLGTQTYICNVNHKPSNTK |
| | VDKKVEPKSCGGGGSGGGGSGGGGSPGWFLDSPDRPWNPPTFSPALLVVT |
| | EGDNATFTCSFSNTSESFVLNWYRMSPSNQTDKLAAFPEDRSQPGQDCRFR |
| | VTQLPNGRDFHMSVVRARRNDSGTYLCGAISLAPKAQIKESLRAELRVTER |
| | RAEVPTAHPSPSPRPAGQFQTLV |
| SEQ ID NO: 755 | QVQLVQSGAEVKKPGASVKVSCKASGYTFTEFGMNWVRQAPGQGLEWM |
| a- | GWINTKTGEATYVEEFKGRVTFTTDTSTSTAYMELRSLRSDDTAVYYCAR |
| CEACAM5/CD3 | WDFAYYVEAMDYWGQGTTVTVSSASTKGPSVFPLAPSSKSTSGGTAALGC |
| HC1- | LVKDYFPEPVTVSWNSGALTSGVHTFPAVLQSSGLYSLSSVVTVPSSSLGTQ |
| SIGLEC10ecd | TYICNVNHKPSNTKVDKKVEPKSCDKTHTCPPCPAPEAAGGPSVFLFPPKP |
| | KDTLMISRTPEVTCVVVDVSHEDPEVKFNWYVDGVEVHNAKTKPREEQY |
| | NSTYRVVSVLTVLHQDWLNGKEYKCKVSNKALGAPIEKTISKAKGQPREP |
| | QVCTLPPSRDELTKNQVSLSCAVKGFYPSDIAVEWESNGQPENNYKTTPPV |
| | LDSDGSFFLVSKLTVDKSRWQQGNVFSCSVMHEALHNHYTQKSLSLSPGK |
| | GGGGSGGGGSGGGGSMDGRFWIRVQESVMVPEGLCISVPCSFSYPRQDWT |
| | GSTPAYGYWFKAVTETTKGAPVATNHQSREVEMSTRGRFQLTGDPAKGN |
| | CSLVIRDAQMQDESQYFFRVERGSYVRYNFMNDGFFLKVTALTQKPDVYI |
| | PETLEPGQPVTVICVFNWAFEECPPPSFSWTGAALSSQGTKPTTSHFSVLSFT |
| | PRPQDHNTDLTCHVDFSRKGVSAQRTVRLRVAYAPRDLVISISRDNTPALE |
| | PQPQGNVPYLEAQKGQFLRLLCAADSQPPATLSWVLQNRVLSSSHPWGPR |
| | PLGLELPGVKAGDSGRYTCRAENRLGSQQRALDLSVQYPPENLRVMVSQA |
| | NRTVLENLGNGTSLPVLEGQSLCLVCVTHSSPPARLSWTQRGQVLSPSQPS |
| | DPGVLELPRVQVEHEGEFTCHARHPLGSQHVSLSLSVHYSPKLLGPSCSWE |
| | AEGLHCSCSSQASPAPSLRWWLGEELLEGNSSQDSFEVTPSSAGPWANSSL |
| | SLHGGLSSGLRLRCEAWNVHGAQSGSILQLPDKKGLIST |
| SEQ ID NO: 756 | QVQLVQSGAEVKKPGASVKVSCKASGYTFTEFGMNWVRQAPGQGLEWM |
| a- | GWINTKTGEATYVEEFKGRVTFTTDTSTSTAYMELRSLRSDDTAVYYCAR |
| CEACAM5/CD3 | WDFAYYVEAMDYWGQGTTVTVSSASTKGPSVFPLAPSSKSTSGGTAALGC |
| HC2- | LVKDYFPEPVTVSWNSGALTSGVHTFPAVLQSSGLYSLSSVVTVPSSSLGTQ |
| SIGLEC10ecd | TYICNVNHKPSNTKVDKKVEPKSCDGGGGSGGGGSEVQLLESGGGLVQPG |
| | GSLRLSCAASGFTFSTYAMNWVRQAPGKGLEWVSRIRSKYNNYATYYADS |
| | VKGRFTISRDDSKNTLYLQMNSLRAEDTAVYYCVRHGNFGNSYVSWFAY |
| | WGQGTLVTVSSASVAAPSVFIFPPSDEQLKSGTASVVCLLNNFYPREAKVQ |
| | WKVDNALQSGNSQESVTEQDSKDSTYSLSSTLTLSKADYEKHKVYACEVT |
| | HQGLSSPVTKSFNRGECDKTHTCPPCPAPEAAGGPSVFLFPPKPKDTLMISR |
| | TPEVTCVVVDVSHEDPEVKFNWYVDGVEVHNAKTKPREEQYNSTYRVVS |
| | VLTVLHQDWLNGKEYKCKVSNKALGAPIEKTISKAKGQPREPQVYTLPPC |
| | RDELTKNQVSLWCLVKGFYPSDIAVEWESNGQPENNYKTTPPVLDSDGSFF |
| | LYSKLTVDKSRWQQGNVFSCSVMHEALHNHYTQKSLSLSPGKGGGGSGG |
| | GGSGGGGSMDGRFWIRVQESVMVPEGLCISVPCSFSYPRQDWTGSTPAYG |
| | YWFKAVTETTKGAPVATNHQSREVEMSTRGRFQLTGDPAKGNCSLVIRDA |
| | QMQDESQYFFRVERGSYVRYNFMNDGFFLKVTALTQKPDVYIPETLEPGQ |
| | PVTVICVFNWAFEECPPPSFSWTGAALSSQGTKPTTSHFSVLSFTPRPQDHN |
| | TDLTCHVDFSRKGVSAQRTVRLRVAYAPRDLVISISRDNTPALEPQPQGNV |
| | PYLEAQKGQFLRLLCAADSQPPATLSWVLQNRVLSSSHPWGPRPLGLELPG |
| | VKAGDSGRYTCRAENRLGSQQRALDLSVQYPPENLRVMVSQANRTVLEN |
| | LGNGTSLPVLEGQSLCLVCVTHSSPPARLSWTQRGQVLSPSQPSDPGVLELP |
| | RVQVEHEGEFTCHARHPLGSQHVSLSLSVHYSPKLLGPSCSWEAEGLHCSC |
| | SSQASPAPSLRWWLGEELLEGNSSQDSFEVTPSSAGPWANSSLSLHGGLSS |
| | GLRLRCEAWNVHGAQSGSILQLPDKKGLIST |
| SEQ ID NO: 757 | DIQMTQSPSSLSASVGDRVTITCKASAAVGTYVAWYQQKPGKAPKLLIYSA |
| a- | SYRKRGVPSRFSGSGSGTDFTLTISSLQPEDFATYYCHQYYTYPLFTFGQGT |
| CEACAM5/CD3 | KLEIKRTVAAPSVFIFPPSDEQLKSGTASVVCLLNNFYPREAKVQWKVDNA |
| LC1- | LQSGNSQESVTEQDSKDSTYSLSSTLTLSKADYEKHKVYACEVTHQGLSSP |
| SIGLEC10ecd | VTKSFNRGECGGGGSGGGGSGGGGSMDGRFWIRVQESVMVPEGLCISVPC |
| | SFSYPRQDWTGSTPAYGYWFKAVTETTKGAPVATNHQSREVEMSTRGRFQ |
| | LTGDPAKGNCSLVIRDAQMQDESQYFFRVERGSYVRYNFMNDGFFLKVTA |
| | LTQKPDVYIPETLEPGQPVTVICVFNWAFEECPPPSFSWTGAALSSQGTKPT |
| | TSHFSVLSFTPRPQDHNTDLTCHVDFSRKGVSAQRTVRLRVAYAPRDLVISI |
| | SRDNTPALEPQPQGNVPYLEAQKGQFLRLLCAADSQPPATLSWVLQNRVL |
| | SSSHPWGPRPLGLELPGVKAGDSGRYTCRAENRLGSQQRALDLSVQYPPEN |
| | LRVMVSQANRTVLENLGNGTSLPVLEGQSLCLVCVTHSSPPARLSWTQRG |
| | QVLSPSQPSDPGVLELPRVQVEHEGEFTCHARHPLGSQHVSLSLSVHYSPKL |
| | LGPSCSWEAEGLHCSCSSQASPAPSLRWWLGEELLEGNSSQDSFEVTPSSA |
| | GPWANSSLSLHGGLSSGLRLRCEAWNVHGAQSGSILQLPDKKGLIST |
| SEQ ID NO: 758 | QAVVTQEPSLTVSPGGTVTLTCGSSTGAVTTSNYANWVQEKPGQAFRGLIG |
| a- | GTNKRAPGTPARFSGSLLGGKAALTLSGAQPEDEAEYYCALWYSNLWVFG |
| CEACAM5/CD3 | GGTKLTVLSSASTKGPSVFPLAPSSKSTSGGTAALGCLVKDYFPEPVTVSW |
| LC2- | NSGALTSGVHTFPAVLQSSGLYSLSSVVTVPSSSLGTQTYICNVNHKPSNTK |
| SIGLEC10ecd | VDKKVEPKSCGGGGSGGGGSGGGGSMDGRFWIRVQESVMVPEGLCISVPC |
| | SFSYPRQDWTGSTPAYGYWFKAVTETTKGAPVATNHQSREVEMSTRGRFQ |
| | LTGDPAKGNCSLVIRDAQMQDESQYFFRVERGSYVRYNFMNDGFFLKVTA |
| | LTQKPDVYIPETLEPGQPVTVICVFNWAFEECPPPSFSWTGAALSSQGTKPT |
| | TSHFSVLSFTPRPQDHNTDLTCHVDFSRKGVSAQRTVRLRVAYAPRDLVISI |
| | SRDNTPALEPQPQGNVPYLEAQKGQFLRLLCAADSQPPATLSWVLQNRVL |
| | SSSHPWGPRPLGLELPGVKAGDSGRYTCRAENRLGSQQRALDLSVQYPPEN |
| | LRVMVSQANRTVLENLGNGTSLPVLEGQSLCLVCVTHSSPPARLSWTQRG |
| | QVLSPSQPSDPGVLELPRVQVEHEGEFTCHARHPLGSQHVSLSLSVHYSPKL |
| | LGPSCSWEAEGLHCSCSSQASPAPSLRWWLGEELLEGNSSQDSFEVTPSSA |
| | GPWANSSLSLHGGLSSGLRLRCEAWNVHGAQSGSILQLPDKKGLIST |
| SEQ ID NO: 759 | QVQLVQSGAEVKKPGASVKVSCKASGYTFTEFGMNWVRQAPGQGLEWM |
| a- | GWINTKTGEATYVEEFKGRVTFTTDTSTSTAYMELRSLRSDDTAVYYCAR |
| CEACAM5/CD3 | WDFAYYVEAMDYWGQGTTVTVSSASTKGPSVFPLAPSSKSTSGGTAALGC |
| HC1-SIRPaecd | LVKDYFPEPVTVSWNSGALTSGVHTFPAVLQSSGLYSLSSVVTVPSSSLGTQ |
| | TYICNVNHKPSNTKVDKKVEPKSCDKTHTCPPCPAPEAAGGPSVFLFPPKP |
| | KDTLMISRTPEVTCVVVDVSHEDPEVKFNWYVDGVEVHNAKTKPREEQY |
| | NSTYRVVSVLTVLHQDWLNGKEYKCKVSNKALGAPIEKTISKAKGQPREP |
| | QVCTLPPSRDELTKNQVSLSCAVKGFYPSDIAVEWESNGQPENNYKTTPPV |
| | LDSDGSFFLVSKLTVDKSRWQQGNVFSCSVMHEALHNHYTQKSLSLSPGK |
| | GGGGSGGGGSGGGGSEEELQVIQPDKSVLVAAGETATLRCTATSLIPVGPIQ |
| | WFRGAGPGRELIYNQKEGHFPRVTTVSDLTKRNNMDFSIRIGNITPADAGT |
| | YYCVKFRKGSPDDVEFKSGAGTELSVRAKPS |
| SEQ ID NO: 760 | QVQLVQSGAEVKKPGASVKVSCKASGYTFTEFGMNWVRQAPGQGLEWM |
| a- | GWINTKTGEATYVEEFKGRVTFTTDTSTSTAYMELRSLRSDDTAVYYCAR |
| CEACAM5/CD3 | WDFAYYVEAMDYWGQGTTVTVSSASTKGPSVFPLAPSSKSTSGGTAALGC |
| HC2-SIRPaecd | LVKDYFPEPVTVSWNSGALTSGVHTFPAVLQSSGLYSLSSVVTVPSSSLGTQ |
| | TYICNVNHKPSNTKVDKKVEPKSCDGGGGSGGGGSEVQLLESGGGLVQPG |
| | GSLRLSCAASGFTFSTYAMNWVRQAPGKGLEWVSRIRSKYNNYATYYADS |
| | VKGRFTISRDDSKNTLYLQMNSLRAEDTAVYYCVRHGNFGNSYVSWFAY |
| | WGQGTLVTVSSASVAAPSVFIFPPSDEQLKSGTASVVCLLNNFYPREAKVQ |
| | WKVDNALQSGNSQESVTEQDSKDSTYSLSSTLTLSKADYEKHKVYACEVT |
| | HQGLSSPVTKSFNRGECDKTHTCPPCPAPEAAGGPSVFLFPPKPKDTLMISR |
| | TPEVTCVVVDVSHEDPEVKFNWYVDGVEVHNAKTKPREEQYNSTYRVVS |
| | VLTVLHQDWLNGKEYKCKVSNKALGAPIEKTISKAKGQPREPQVYTLPPC |
| | RDELTKNQVSLWCLVKGFYPSDIAVEWESNGQPENNYKTTPPVLDSDGSFF |
| | LYSKLTVDKSRWQQGNVFSCSVMHEALHNHYTQKSLSLSPGKGGGGSGG |
| | GGSGGGGSEEELQVIQPDKSVLVAAGETATLRCTATSLIPVGPIQWFRGAGP |
| | GRELIYNQKEGHFPRVTTVSDLTKRNNMDFSIRIGNITPADAGTYYCVKFR |
| | KGSPDDVEFKSGAGTELSVRAKPS |
| SEQ ID NO: 761 | DIQMTQSPSSLSASVGDRVTITCKASAAVGTYVAWYQQKPGKAPKLLIYSA |
| a- | SYRKRGVPSRFSGSGSGTDFTLTISSLQPEDFATYYCHQYYTYPLFTFGQGT |
| CEACAM5/CD3 | KLEIKRTVAAPSVFIFPPSDEQLKSGTASVVCLLNNFYPREAKVQWKVDNA |
| LC1-SIRPaecd | LQSGNSQESVTEQDSKDSTYSLSSTLTLSKADYEKHKVYACEVTHQGLSSP |
| | VTKSFNRGECGGGGSGGGGSGGGGSEEELQVIQPDKSVLVAAGETATLRC |
| | TATSLIPVGPIQWFRGAGPGRELIYNQKEGHFPRVTTVSDLTKRNNMDFSIR |
| | IGNITPADAGTYYCVKFRKGSPDDVEFKSGAGTELSVRAKPS |
| SEQ ID NO: 762 | QAVVTQEPSLTVSPGGTVTLTCGSSTGAVTTSNYANWVQEKPGQAFRGLIG |
| a- | GTNKRAPGTPARFSGSLLGGKAALTLSGAQPEDEAEYYCALWYSNLWVFG |
| CEACAM5/CD3 | GGTKLTVLSSASTKGPSVFPLAPSSKSTSGGTAALGCLVKDYFPEPVTVSW |
| LC2-SIRPaecd | NSGALTSGVHTFPAVLQSSGLYSLSSVVTVPSSSLGTQTYICNVNHKPSNTK |
| | VDKKVEPKSCGGGGSGGGGSGGGGSEEELQVIQPDKSVLVAAGETATLRC |
| | TATSLIPVGPIQWFRGAGPGRELIYNQKEGHFPRVTTVSDLTKRNNMDFSIR |
| | IGNITPADAGTYYCVKFRKGSPDDVEFKSGAGTELSVRAKPS |
| SEQ ID NO: 763 | QVQLVQSGAEVKKPGASVKVSCKASGYTFTEFGMNWVRQAPGQGLEWM |
| a- | GWINTKTGEATYVEEFKGRVTFTTDTSTSTAYMELRSLRSDDTAVYYCAR |
| CEACAM5/CD3 | WDFAYYVEAMDYWGQGTTVTVSSASTKGPSVFPLAPSSKSTSGGTAALGC |
| HC1-TGFbRecd | LVKDYFPEPVTVSWNSGALTSGVHTFPAVLQSSGLYSLSSVVTVPSSSLGTQ |
| | TYICNVNHKPSNTKVDKKVEPKSCDKTHTCPPCPAPEAAGGPSVFLFPPKP |
| | KDTLMISRTPEVTCVVVDVSHEDPEVKFNWYVDGVEVHNAKTKPREEQY |
| | NSTYRVVSVLTVLHQDWLNGKEYKCKVSNKALGAPIEKTISKAKGQPREP |
| | QVCTLPPSRDELTKNQVSLSCAVKGFYPSDIAVEWESNGQPENNYKTTPPV |
| | LDSDGSFFLVSKLTVDKSRWQQGNVFSCSVMHEALHNHYTQKSLSLSPGK |
| | GGGGSGGGGSGGGGSTIPPHVQKSVNNDMIVTDNNGAVKFPQLCKFCDVR |
| | FSTCDNQKSCMSNCSITSICEKPQEVCVAVWRKNDENITLETVCHDPKLPY |
| | HDFILEDAASPKCIMKEKKKPGETFFMCSCSSDECNDNIIFSEEYNTSNPD |
| SEQ ID NO: 764 | QVQLVQSGAEVKKPGASVKVSCKASGYTFTEFGMNWVRQAPGQGLEWM |
| a- | GWINTKTGEATYVEEFKGRVTFTTDTSTSTAYMELRSLRSDDTAVYYCAR |
| CEACAM5/CD3 | WDFAYYVEAMDYWGQGTTVTVSSASTKGPSVFPLAPSSKSTSGGTAALGC |
| HC2-TGFbRecd | LVKDYFPEPVTVSWNSGALTSGVHTFPAVLQSSGLYSLSSVVTVPSSSLGTQ |
| | TYICNVNHKPSNTKVDKKVEPKSCDGGGGSGGGGSEVQLLESGGGLVQPG |
| | GSLRLSCAASGFTFSTYAMNWVRQAPGKGLEWVSRIRSKYNNYATYYADS |
| | VKGRFTISRDDSKNTLYLQMNSLRAEDTAVYYCVRHGNFGNSYVSWFAY |
| | WGQGTLVTVSSASVAAPSVFIFPPSDEQLKSGTASVVCLLNNFYPREAKVQ |
| | WKVDNALQSGNSQESVTEQDSKDSTYSLSSTLTLSKADYEKHKVYACEVT |
| | HQGLSSPVTKSFNRGECDKTHTCPPCPAPEAAGGPSVFLFPPKPKDTLMISR |
| | TPEVTCVVVDVSHEDPEVKFNWYVDGVEVHNAKTKPREEQYNSTYRVVS |
| | VLTVLHQDWLNGKEYKCKVSNKALGAPIEKTISKAKGQPREPQVYTLPPC |
| | RDELTKNQVSLWCLVKGFYPSDIAVEWESNGQPENNYKTTPPVLDSDGSFF |
| | LYSKLTVDKSRWQQGNVFSCSVMHEALHNHYTQKSLSLSPGKGGGGSGG |
| | GGSGGGGSTIPPHVQKSVNNDMIVTDNNGAVKFPQLCKFCDVRFSTCDNQ |
| | KSCMSNCSITSICEKPQEVCVAVWRKNDENITLETVCHDPKLPYHDFILEDA |
| | ASPKCIMKEKKKPGETFFMCSCSSDECNDNIIFSEEYNTSNPD |
| SEQ ID NO: 765 | QVQLVQSGAEVKKPGASVKVSCKASGYTFTEFGMNWVRQAPGQGLEWM |
| a- | GWINTKTGEATYVEEFKGRVTFTTDTSTSTAYMELRSLRSDDTAVYYCAR |
| CEACAM5/CD3 | WDFAYYVEAMDYWGQGTTVTVSSASTKGPSVFPLAPSSKSTSGGTAALGC |
| HC1-TIM3ecd | LVKDYFPEPVTVSWNSGALTSGVHTFPAVLQSSGLYSLSSVVTVPSSSLGTQ |
| | TYICNVNHKPSNTKVDKKVEPKSCDKTHTCPPCPAPEAAGGPSVFLFPPKP |
| | KDTLMISRTPEVTCVVVDVSHEDPEVKFNWYVDGVEVHNAKTKPREEQY |
| | NSTYRVVSVLTVLHQDWLNGKEYKCKVSNKALGAPIEKTISKAKGQPREP |
| | QVCTLPPSRDELTKNQVSLSCAVKGFYPSDIAVEWESNGQPENNYKTTPPV |
| | LDSDGSFFLVSKLTVDKSRWQQGNVFSCSVMHEALHNHYTQKSLSLSPGK |
| | GGGGSGGGGSGGGGSSEVEYRAEVGQNAYLPCFYTPAAPGNLVPVCWGK |
| | GACPVFECGNVVLRTDERDVNYWTSRYWLNGDFRKGDVSLTIENVTLADS |
| | GIYCCRIQIPGIMNDEKFNLKLVIKPAKVTPAPTRQRDFTAAFPRMLTTRGH |
| | GPAETQTLGSLPDINLTQISTLANELRDSRLANDLRDSGATIRIG |
| SEQ ID NO: 766 | QVQLVQSGAEVKKPGASVKVSCKASGYTFTEFGMNWVRQAPGQGLEWM |
| a- | GWINTKTGEATYVEEFKGRVTFTTDTSTSTAYMELRSLRSDDTAVYYCAR |
| CEACAM5/CD3 | WDFAYYVEAMDYWGQGTTVTVSSASTKGPSVFPLAPSSKSTSGGTAALGC |
| HC2-TIM3ecd | LVKDYFPEPVTVSWNSGALTSGVHTFPAVLQSSGLYSLSSVVTVPSSSLGTQ |
| | TYICNVNHKPSNTKVDKKVEPKSCDGGGGSGGGGSEVQLLESGGGLVQPG |
| | GSLRLSCAASGFTFSTYAMNWVRQAPGKGLEWVSRIRSKYNNYATYYADS |
| | VKGRFTISRDDSKNTLYLQMNSLRAEDTAVYYCVRHGNFGNSYVSWFAY |
| | WGQGTLVTVSSASVAAPSVFIFPPSDEQLKSGTASVVCLLNNFYPREAKVQ |
| | WKVDNALQSGNSQESVTEQDSKDSTYSLSSTLTLSKADYEKHKVYACEVT |
| | HQGLSSPVTKSFNRGECDKTHTCPPCPAPEAAGGPSVFLFPPKPKDTLMISR |
| | TPEVTCVVVDVSHEDPEVKFNWYVDGVEVHNAKTKPREEQYNSTYRVVS |
| | VLTVLHQDWLNGKEYKCKVSNKALGAPIEKTISKAKGQPREPQVYTLPPC |
| | RDELTKNQVSLWCLVKGFYPSDIAVEWESNGQPENNYKTTPPVLDSDGSFF |
| | LYSKLTVDKSRWQQGNVFSCSVMHEALHNHYTQKSLSLSPGKGGGGSGG |
| | GGSGGGGSSEVEYRAEVGQNAYLPCFYTPAAPGNLVPVCWGKGACPVFEC |
| | GNVVLRTDERDVNYWTSRYWLNGDFRKGDVSLTIENVTLADSGIYCCRIQI |
| | PGIMNDEKFNLKLVIKPAKVTPAPTRQRDFTAAFPRMLTTRGHGPAETQTL |
| | GSLPDINLTQISTLANELRDSRLANDLRDSGATIRIG |
| SEQ ID NO: 767 | DIQMTQSPSSLSASVGDRVTITCKASAAVGTYVAWYQQKPGKAPKLLIYSA |
| a- | SYRKRGVPSRFSGSGSGTDFTLTISSLQPEDFATYYCHQYYTYPLFTFGQGT |
| CEACAM5/CD3 | KLEIKRTVAAPSVFIFPPSDEQLKSGTASVVCLLNNFYPREAKVQWKVDNA |
| LC1-TIM3ecd | LQSGNSQESVTEQDSKDSTYSLSSTLTLSKADYEKHKVYACEVTHQGLSSP |
| | VTKSFNRGECGGGGSGGGGSGGGGSSEVEYRAEVGQNAYLPCFYTPAAPG |
| | NLVPVCWGKGACPVFECGNVVLRTDERDVNYWTSRYWLNGDFRKGDVS |
| | LTIENVTLADSGIYCCRIQIPGIMNDEKFNLKLVIKPAKVTPAPTRQRDFTAA |
| | FPRMLTTRGHGPAETQTLGSLPDINLTQISTLANELRDSRLANDLRDSGATI |
| | RIG |
| SEQ ID NO: 768 | QAVVTQEPSLTVSPGGTVTLTCGSSTGAVTTSNYANWVQEKPGQAFRGLIG |
| a- | GTNKRAPGTPARFSGSLLGGKAALTLSGAQPEDEAEYYCALWYSNLWVFG |
| CEACAM5/CD3 | GGTKLTVLSSASTKGPSVFPLAPSSKSTSGGTAALGCLVKDYFPEPVTVSW |
| LC2-TIM3ecd | NSGALTSGVHTFPAVLQSSGLYSLSSVVTVPSSSLGTQTYICNVNHKPSNTK |
| | VDKKVEPKSCGGGGSGGGGSGGGGSSEVEYRAEVGQNAYLPCFYTPAAPG |
| | NLVPVCWGKGACPVFECGNVVLRTDERDVNYWTSRYWLNGDFRKGDVS |
| | LTIENVTLADSGIYCCRIQIPGIMNDEKFNLKLVIKPAKVTPAPTRQRDFTAA |
| | FPRMLTTRGHGPAETQTLGSLPDINLTQISTLANELRDSRLANDLRDSGATI |
| | RIG |
| SEQ ID NO: 769 | QVQLVQSGAEVKKPGASVKVSCKASGYTFTEFGMNWVRQAPGQGLEWM |
| a- | GWINTKTGEATYVEEFKGRVTFTTDTSTSTAYMELRSLRSDDTAVYYCAR |
| CEACAM5/CD3 | WDFAYYVEAMDYWGQGTTVTVSSASTKGPSVFPLAPSSKSTSGGTAALGC |
| HC1-VEGFRecd | LVKDYFPEPVTVSWNSGALTSGVHTFPAVLQSSGLYSLSSVVTVPSSSLGTQ |
| | TYICNVNHKPSNTKVDKKVEPKSCDKTHTCPPCPAPEAAGGPSVFLFPPKP |
| | KDTLMISRTPEVTCVVVDVSHEDPEVKFNWYVDGVEVHNAKTKPREEQY |
| | NSTYRVVSVLTVLHQDWLNGKEYKCKVSNKALGAPIEKTISKAKGQPREP |
| | QVCTLPPSRDELTKNQVSLSCAVKGFYPSDIAVEWESNGQPENNYKTTPPV |
| | LDSDGSFFLVSKLTVDKSRWQQGNVFSCSVMHEALHNHYTQKSLSLSPGK |
| | GGGGSGGGGSGGGGSSDTGRPFVEMYSEIPEIIHMTEGRELVIPCRVTSPNIT |
| | VTLKKFPLDTLIPDGKRIIWDSRKGFIISNATYKEIGLLTCEATVNGHLYKTN |
| | YLTHRQTNTIIDVVLSPSHGIELSVGEKLVLNCTARTELNVGIDFNWEYPSS |
| | KHQHKKLVNRDLKTQSGSEMKKFLSTLTIDGVTRSDQGLYTCAASSGLMT |
| | KKNSTFVRVHEK |
| SEQ ID NO: 770 | QVQLVQSGAEVKKPGASVKVSCKASGYTFTEFGMNWVRQAPGQGLEWM |
| a- | GWINTKTGEATYVEEFKGRVTFTTDTSTSTAYMELRSLRSDDTAVYYCAR |
| CEACAM5/CD3 | WDFAYYVEAMDYWGQGTTVTVSSASTKGPSVFPLAPSSKSTSGGTAALGC |
| HC2-VEGFRecd | LVKDYFPEPVTVSWNSGALTSGVHTFPAVLQSSGLYSLSSVVTVPSSSLGTQ |
| | TYICNVNHKPSNTKVDKKVEPKSCDGGGGSGGGGSEVQLLESGGGLVQPG |
| | GSLRLSCAASGFTFSTYAMNWVRQAPGKGLEWVSRIRSKYNNYATYYADS |
| | VKGRFTISRDDSKNTLYLQMNSLRAEDTAVYYCVRHGNFGNSYVSWFAY |
| | WGQGTLVTVSSASVAAPSVFIFPPSDEQLKSGTASVVCLLNNFYPREAKVQ |
| | WKVDNALQSGNSQESVTEQDSKDSTYSLSSTLTLSKADYEKHKVYACEVT |
| | HQGLSSPVTKSFNRGECDKTHTCPPCPAPEAAGGPSVFLFPPKPKDTLMISR |
| | TPEVTCVVVDVSHEDPEVKFNWYVDGVEVHNAKTKPREEQYNSTYRVVS |
| | VLTVLHQDWLNGKEYKCKVSNKALGAPIEKTISKAKGQPREPQVYTLPPC |
| | RDELTKNQVSLWCLVKGFYPSDIAVEWESNGQPENNYKTTPPVLDSDGSFF |
| | LYSKLTVDKSRWQQGNVFSCSVMHEALHNHYTQKSLSLSPGKGGGGSGG |
| | GGSGGGGSSDTGRPFVEMYSEIPEIIHMTEGRELVIPCRVTSPNITVTLKKFP |
| | LDTLIPDGKRIIWDSRKGFIISNATYKEIGLLTCEATVNGHLYKTNYLTHRQT |
| | NTIIDVVLSPSHGIELSVGEKLVLNCTARTELNVGIDFNWEYPSSKHQHKKL |
| | VNRDLKTQSGSEMKKFLSTLTIDGVTRSDQGLYTCAASSGLMTKKNSTFVR |
| | VHEK |

[0629] Sequences of the Alts of the present invention are found in Table 2.

TABLE 2

| Fusion protein of the invention | Sequence IDs |
|---|---|
| anti-EGFR-BTLAecd-PD1ecd | heavy chain = SEQ ID NO: 220 |
| (cetuximab) | light chain = SEQ ID NO: 221 |
| anti-EGFR-BTLAecd-SIGLEC10ecd | heavy chain = SEQ ID NO: 220 |
| (cetuximab) | light chain = SEQ ID NO: 222 |
| anti-EGFR-BTLAecd-SIRPaecd | heavy chain = SEQ ID NO: 220 |
| (cetuximab) | light chain = SEQ ID NO: 223 |
| anti-EGFR-BTLAecd-TIM3ecd | heavy chain = SEQ ID NO: 220 |
| (cetuximab) | light chain = SEQ ID NO: 224 |
| anti-EGFR-BTLAecd | heavy chain = SEQ ID NO: 220 |
| (cetuximab) | light chain = SEQ ID NO: 43 |
| anti-EGFR-PD1ecd-BTLAecd | heavy chain = SEQ ID NO: 225 |
| (cetuximab) | light chain = SEQ ID NO: 226 |
| anti-EGFR-PD1ecd-SIGLEC10ecd | heavy chain = SEQ ID NO: 225 |
| (cetuximab) | light chain = SEQ ID NO: 222 |
| anti-EGFR-PD1ecd-SIRPaecd | heavy chain = SEQ ID NO: 225 |
| (cetuximab) | light chain = SEQ ID NO: 223 |
| anti-EGFR-PD1ecd-TIM3ecd | heavy chain = SEQ ID NO: 225 |
| (cetuximab) | light chain = SEQ ID NO: 224 |
| anti-EGFR-PD1ecd | heavy chain = SEQ ID NO: 225 |
| (cetuximab) | light chain = SEQ ID NO: 43 |
| anti-EGFR-SIGLEC10ecd-BTLAecd | heavy chain = SEQ ID NO: 227 |
| (cetuximab) | light chain = SEQ ID NO: 226 |
| anti-EGFR-SIGLEC10ecd-PD1ecd | heavy chain = SEQ ID NO: 227 |
| (cetuximab) | light chain = SEQ ID NO: 221 |
| anti-EGFR-SIGLEC10ecd-SIRPaecd | heavy chain = SEQ ID NO: 227 |
| (cetuximab) | light chain = SEQ ID NO: 223 |
| anti-EGFR-SIGLEC10ecd-TIM3ecd | heavy chain = SEQ ID NO: 227 |
| (cetuximab) | light chain = SEQ ID NO: 224 |
| anti-EGFR-SIGLEC10ecd | heavy chain = SEQ ID NO: 227 |
| (cetuximab) | light chain = SEQ ID NO: 43 |
| anti-EGFR-SIRPaecd-BTLAecd | heavy chain = SEQ ID NO: 228 |
| (cetuximab) | light chain = SEQ ID NO: 226 |
| anti-EGFR-SIRPaecd-PD1ecd | heavy chain = SEQ ID NO: 228 |
| (cetuximab) | light chain = SEQ ID NO: 221 |
| anti-EGFR-SIRPaecd-SIGLEC10ecd | heavy chain = SEQ ID NO: 228 |
| (cetuximab) | light chain = SEQ ID NO: 222 |
| anti-EGFR-SIRPaecd-TIM3ecd | heavy chain = SEQ ID NO: 228 |
| (cetuximab) | light chain = SEQ ID NO: 224 |
| anti-EGFR-SIRPaecd | heavy chain = SEQ ID NO: 228 |
| (cetuximab) | light chain = SEQ ID NO: 43 |
| anti-EGFR-TGFbRecd-BTLAecd | heavy chain = SEQ ID NO: 229 |
| (cetuximab) | light chain = SEQ ID NO: 226 |
| anti-EGFR-TGFbRecd-PD1ecd | heavy chain = SEQ ID NO: 229 |
| (cetuximab) | light chain = SEQ ID NO: 221 |
| anti-EGFR-TGFbRecd-SIGLEC10ecd | heavy chain = SEQ ID NO: 229 |
| (cetuximab) | light chain = SEQ ID NO: 222 |
| anti-EGFR-TGFbRecd-SIRPaecd | heavy chain = SEQ ID NO: 229 |
| (cetuximab) | light chain = SEQ ID NO: 223 |
| anti-EGFR-TGFbRecd-TIM3ecd | heavy chain = SEQ ID NO: 229 |
| (cetuximab) | light chain = SEQ ID NO: 224 |
| anti-EGFR-TGFbRecd | heavy chain = SEQ ID NO: 229 |
| (cetuximab) | light chain = SEQ ID NO: 43 |
| anti-EGFR-TIM3ecd-BTLAecd | heavy chain = SEQ ID NO: 230 |
| (cetuximab) | light chain = SEQ ID NO: 226 |
| anti-EGFR-TIM3ecd-PD1ecd | heavy chain = SEQ ID NO: 230 |
| (cetuximab) | light chain = SEQ ID NO: 221 |
| anti-EGFR-TIM3ecd-SIGLEC10ecd | heavy chain = SEQ ID NO: 230 |
| (cetuximab) | light chain = SEQ ID NO: 222 |
| anti-EGFR-TIM3ecd-SIRPaecd | heavy chain = SEQ ID NO: 230 |
| (cetuximab) | light chain = SEQ ID NO: 223 |
| anti-EGFR-TIM3ecd | heavy chain = SEQ ID NO: 230 |
| (cetuximab) | light chain = SEQ ID NO: 43 |
| anti-EGFR-VEGFRecd-BTLAecd | heavy chain = SEQ ID NO: 231 |
| (cetuximab) | light chain = SEQ ID NO: 226 |
| anti-EGFR-VEGFRecd-PD1ecd | heavy chain = SEQ ID NO: 231 |
| (cetuximab) | light chain = SEQ ID NO: 221 |
| anti-EGFR-VEGFRecd-SIGLEC10ecd | heavy chain = SEQ ID NO: 231 |
| (cetuximab) | light chain = SEQ ID NO: 222 |
| anti-EGFR-VEGFRecd-SIRPaecd | heavy chain = SEQ ID NO: 231 |
| (cetuximab) | light chain = SEQ ID NO: 223 |
| anti-EGFR-VEGFRecd-TIM3ecd | heavy chain = SEQ ID NO: 231 |
| (cetuximab) | light chain = SEQ ID NO: 224 |
| anti-EGFR-VEGFRecd | heavy chain = SEQ ID NO: 231 |
| (cetuximab) | light chain = SEQ ID NO: 43 |
| anti-EGFRvIII-BTLAecd-PD1ecd | heavy chain = SEQ ID NO: 232 |
| (depatuxizumab) | light chain = SEQ ID NO: 233 |
| anti-EGFRvIII-BTLAecd-SIGLEC10ecd | heavy chain = SEQ ID NO: 232 |
| (depatuxizumab) | light chain = SEQ ID NO: 234 |
| anti-EGFRvIII-BTLAecd-SIRPaecd | heavy chain = SEQ ID NO: 232 |
| (depatuxizumab) | light chain = SEQ ID NO: 235 |
| anti-EGFRvIII-BTLAecd-TIM3ecd | heavy chain = SEQ ID NO: 232 |
| (depatuxizumab) | light chain = SEQ ID NO: 236 |
| anti-EGFRvIII-BTLAecd | heavy chain = SEQ ID NO: 232 |
| (depatuxizumab) | light chain = SEQ ID NO: 47 |
| anti-EGFRvIII-PD1ecd-BTLAecd | heavy chain = SEQ ID NO: 237 |
| (depatuxizumab) | light chain = SEQ ID NO: 238 |
| anti-EGFRvIII-PD1ecd-SIGLEC10ecd | heavy chain = SEQ ID NO: 237 |
| (depatuxizumab) | light chain = SEQ ID NO: 234 |
| anti-EGFRvIII-PD1ecd-SIRPaecd | heavy chain = SEQ ID NO: 237 |
| (depatuxizumab) | light chain = SEQ ID NO: 235 |
| anti-EGFRvIII-PD1ecd-TIM3ecd | heavy chain = SEQ ID NO: 237 |
| (depatuxizumab) | light chain = SEQ ID NO: 236 |
| anti-EGFRvIII-PD1ecd | heavy chain = SEQ ID NO: 237 |
| (depatuxizumab) | light chain = SEQ ID NO: 47 |
| anti-EGFRvIII-SIGLEC10ecd-BTLAecd | heavy chain = SEQ ID NO: 239 |
| (depatuxizumab) | light chain = SEQ ID NO: 238 |
| anti-EGFRvIII-SIGLEC10ecd-PD1ecd | heavy chain = SEQ ID NO: 239 |
| (depatuxizumab) | light chain = SEQ ID NO: 233 |
| anti-EGFRvIII-SIGLEC10ecd-SIRPaecd | heavy chain = SEQ ID NO: 239 |
| (depatuxizumab) | light chain = SEQ ID NO: 235 |
| anti-EGFRvIII-SIGLEC10ecd-TIM3ecd | heavy chain = SEQ ID NO: 239 |
| (depatuxizumab) | light chain = SEQ ID NO: 236 |
| anti-EGFRvIII-SIGLEC10ecd | heavy chain = SEQ ID NO: 239 |
| (depatuxizumab) | light chain = SEQ ID NO: 47 |
| anti-EGFRvIII-SIRPaecd-BTLAecd | heavy chain = SEQ ID NO: 240 |
| (depatuxizumab) | light chain = SEQ ID NO: 238 |
| anti-EGFRvIII-SIRPaecd-PD1ecd | heavy chain = SEQ ID NO: 240 |
| (depatuxizumab) | light chain = SEQ ID NO: 233 |
| anti-EGFRvIII-SIRPaecd-SIGLEC10ecd | heavy chain = SEQ ID NO: 240 |
| (depatuxizumab) | light chain = SEQ ID NO: 234 |
| anti-EGFRvIII-SIRPaecd-TIM3ecd | heavy chain = SEQ ID NO: 240 |
| (depatuxizumab) | light chain = SEQ ID NO: 236 |
| anti-EGFRvIII-SIRPaecd | heavy chain = SEQ ID NO: 240 |
| (depatuxizumab) | light chain = SEQ ID NO: 47 |
| anti-EGFRvIII-TGFbRecd-BTLAecd | heavy chain = SEQ ID NO: 241 |
| (depatuxizumab) | light chain = SEQ ID NO: 238 |
| anti-EGFRvIII-TGFbRecd-PD1ecd | heavy chain = SEQ ID NO: 241 |
| (depatuxizumab) | light chain = SEQ ID NO: 233 |
| anti-EGFRvIII-TGFbRecd-SIGLEC10ecd | heavy chain = SEQ ID NO: 241 |
| (depatuxizumab) | light chain = SEQ ID NO: 234 |
| anti-EGFRvIII-TGFbRecd-SIRPaecd | heavy chain = SEQ ID NO: 241 |
| (depatuxizumab) | light chain = SEQ ID NO: 235 |
| anti-EGFRvIII-TGFbRecd-TIM3ecd | heavy chain = SEQ ID NO: 241 |
| (depatuxizumab) | light chain = SEQ ID NO: 236 |
| anti-EGFRvIII-TGFbRecd | heavy chain = SEQ ID NO: 241 |
| (depatuxizumab) | light chain = SEQ ID NO: 47 |
| anti-EGFRvIII-TIM3ecd-BTLAecd | heavy chain = SEQ ID NO: 242 |
| (depatuxizumab) | light chain = SEQ ID NO: 238 |
| anti-EGFRvIII-TIM3ecd-PD1ecd | heavy chain = SEQ ID NO: 242 |
| (depatuxizumab) | light chain = SEQ ID NO: 233 |
| anti-EGFRvIII-TIM3ecd-SIGLEC10ecd | heavy chain = SEQ ID NO: 242 |
| (depatuxizumab) | light chain = SEQ ID NO: 234 |
| anti-EGFRvIII-TIM3ecd-SIRPaecd | heavy chain = SEQ ID NO: 242 |
| (depatuxizumab) | light chain = SEQ ID NO: 235 |
| anti-EGFRvIII-TIM3ecd | heavy chain = SEQ ID NO: 242 |
| (depatuxizumab) | light chain = SEQ ID NO: 47 |
| anti-EGFRvIII-VEGFRecd-BTLAecd | heavy chain = SEQ ID NO: 243 |
| (depatuxizumab) | light chain = SEQ ID NO: 238 |
| anti-EGFRvIII-VEGFRecd-PD1ecd | heavy chain = SEQ ID NO: 243 |
| (depatuxizumab) | light chain = SEQ ID NO: 233 |
| anti-EGFRvIII-VEGFRecd-SIGLEC10ecd | heavy chain = SEQ ID NO: 243 |
| (depatuxizumab) | light chain = SEQ ID NO: 234 |
| anti-EGFRvIII-VEGFRecd-SIRPaecd | heavy chain = SEQ ID NO: 243 |
| (depatuxizumab) | light chain = SEQ ID NO: 235 |
| anti-EGFRvIII-VEGFRecd-TIM3ecd | heavy chain = SEQ ID NO: 243 |
| (depatuxizumab) | light chain = SEQ ID NO: 236 |
| anti-EGFRvIII-VEGFRecd | heavy chain = SEQ ID NO: 243 |
| (depatuxizumab) | light chain = SEQ ID NO: 47 |
| anti-HER2-BTLAecd-PD1ecd | heavy chain = SEQ ID NO: 244 |
| (trastuzumab) | light chain = SEQ ID NO: 245 |
| anti-HER2-BTLAecd-SIGLEC10ecd | heavy chain = SEQ ID NO: 244 |
| (trastuzumab) | light chain = SEQ ID NO: 246 |
| anti-HER2-BTLAecd-SIRPaecd | heavy chain = SEQ ID NO: 244 |
| (trastuzumab) | light chain = SEQ ID NO: 247 |
| anti-HER2-BTLAecd-TIM3ecd | heavy chain = SEQ ID NO: 244 |
| (trastuzumab) | light chain = SEQ ID NO: 248 |
| anti-HER2-BTLAecd | heavy chain = SEQ ID NO: 244 |
| (trastuzumab) | light chain = SEQ ID NO: 55 |
| anti-HER2-PD1ecd-BTLAecd | heavy chain = SEQ ID NO: 249 |
| (trastuzumab) | light chain = SEQ ID NO: 250 |
| anti-HER2-PD1ecd-SIGLEC10ecd | heavy chain = SEQ ID NO: 249 |
| (trastuzumab) | light chain = SEQ ID NO: 246 |
| anti-HER2-PD1ecd-SIRPaecd | heavy chain = SEQ ID NO: 249 |
| (trastuzumab) | light chain = SEQ ID NO: 247 |
| anti-HER2-PD1ecd-TIM3ecd | heavy chain = SEQ ID NO: 249 |
| (trastuzumab) | light chain = SEQ ID NO: 248 |
| anti-HER2-PD1ecd | heavy chain = SEQ ID NO: 249 |
| (trastuzumab) | light chain = SEQ ID NO: 55 |
| anti-HER2-SIGLEC10ecd-BTLAecd | heavy chain = SEQ ID NO: 251 |
| (trastuzumab) | light chain = SEQ ID NO: 250 |
| anti-HER2-SIGLEC10ecd-PD1ecd | heavy chain = SEQ ID NO: 251 |
| (trastuzumab) | light chain = SEQ ID NO: 245 |
| anti-HER2-SIGLEC10ecd-SIRPaecd | heavy chain = SEQ ID NO: 251 |
| (trastuzumab) | light chain = SEQ ID NO: 247 |
| anti-HER2-SIGLEC10ecd-TIM3ecd | heavy chain = SEQ ID NO: 251 |
| (trastuzumab) | light chain = SEQ ID NO: 248 |
| anti-HER2-SIGLEC10ecd | heavy chain = SEQ ID NO: 251 |
| (trastuzumab) | light chain = SEQ ID NO: 55 |
| anti-HER2-SIRPaecd-BTLAecd | heavy chain = SEQ ID NO: 252 |
| (trastuzumab) | light chain = SEQ ID NO: 250 |
| anti-HER2-SIRPaecd-PD1ecd | heavy chain = SEQ ID NO: 252 |
| (trastuzumab) | light chain = SEQ ID NO: 245 |
| anti-HER2-SIRPaecd-SIGLEC10ecd | heavy chain = SEQ ID NO: 252 |
| (trastuzumab) | light chain = SEQ ID NO: 246 |
| anti-HER2-SIRPaecd-TIM3ecd | heavy chain = SEQ ID NO: 252 |
| (trastuzumab) | light chain = SEQ ID NO: 248 |
| anti-HER2-SIRPaecd | heavy chain = SEQ ID NO: 252 |
| (trastuzumab) | light chain = SEQ ID NO: 55 |
| anti-HER2-TGFbRecd-BTLAecd | heavy chain = SEQ ID NO: 253 |
| (trastuzumab) | light chain = SEQ ID NO: 250 |
| anti-HER2-TGFbRecd-PD1ecd | heavy chain = SEQ ID NO: 253 |
| (trastuzumab) | light chain = SEQ ID NO: 245 |
| anti-HER2-TGFbRecd-SIGLEC10ecd | heavy chain = SEQ ID NO: 253 |
| (trastuzumab) | light chain = SEQ ID NO: 246 |
| anti-HER2-TGFbRecd-SIRPaecd | heavy chain = SEQ ID NO: 253 |
| (trastuzumab) | light chain = SEQ ID NO: 247 |
| anti-HER2-TGFbRecd-TIM3ecd | heavy chain = SEQ ID NO: 253 |
| (trastuzumab) | light chain = SEQ ID NO: 248 |
| anti-HER2-TGFbRecd | heavy chain = SEQ ID NO: 253 |
| (trastuzumab) | light chain = SEQ ID NO: 55 |
| anti-HER2-TIM3ecd-BTLAecd | heavy chain = SEQ ID NO: 254 |
| (trastuzumab) | light chain = SEQ ID NO: 250 |
| anti-HER2-TIM3ecd-PD1ecd | heavy chain = SEQ ID NO: 254 |
| (trastuzumab) | light chain = SEQ ID NO: 245 |
| anti-HER2-TIM3ecd-SIGLEC10ecd | heavy chain = SEQ ID NO: 254 |
| (trastuzumab) | light chain = SEQ ID NO: 246 |
| anti-HER2-TIM3ecd-SIRPaecd | heavy chain = SEQ ID NO: 254 |
| (trastuzumab) | light chain = SEQ ID NO: 247 |
| anti-HER2-TIM3ecd | heavy chain = SEQ ID NO: 254 |
| (trastuzumab) | light chain = SEQ ID NO: 55 |
| anti-HER2-VEGFRecd-BTLAecd | heavy chain = SEQ ID NO: 255 |
| (trastuzumab) | light chain = SEQ ID NO: 250 |
| anti-HER2-VEGFRecd-PD1ecd | heavy chain = SEQ ID NO: 255 |
| (trastuzumab) | light chain = SEQ ID NO: 245 |
| anti-HER2-VEGFRecd-SIGLEC10ecd | heavy chain = SEQ ID NO: 255 |
| (trastuzumab) | light chain = SEQ ID NO: 246 |
| anti-HER2-VEGFRecd-SIRPaecd | heavy chain = SEQ ID NO: 255 |
| (trastuzumab) | light chain = SEQ ID NO: 247 |
| anti-HER2-VEGFRecd-TIM3ecd | heavy chain = SEQ ID NO: 255 |
| (trastuzumab) | light chain = SEQ ID NO: 248 |
| anti-HER2-VEGFRecd | heavy chain = SEQ ID NO: 255 |
| (trastuzumab) | light chain = SEQ ID NO: 55 |
| anti-nectin4-BTLAecd-PD1ecd | heavy chain = SEQ ID NO: 256 |
| (enfortumab) | light chain = SEQ ID NO: 257 |
| anti-nectin4-BTLAecd-SIGLEC10ecd | heavy chain = SEQ ID NO: 256 |
| (enfortumab) | light chain = SEQ ID NO: 258 |
| anti-nectin4-BTLAecd-SIRPaecd | heavy chain = SEQ ID NO: 256 |
| (enfortumab) | light chain = SEQ ID NO: 259 |
| anti-nectin4-BTLAecd-TIM3ecd | heavy chain = SEQ ID NO: 256 |
| (enfortumab) | light chain = SEQ ID NO: 260 |
| anti-nectin4-BTLAecd | heavy chain = SEQ ID NO: 256 |
| (enfortumab) | light chain = SEQ ID NO: 160 |
| anti-nectin4-PD1ecd-BTLAecd | heavy chain = SEQ ID NO: 261 |
| (enfortumab) | light chain = SEQ ID NO: 262 |
| anti-nectin4-PD1ecd-SIGLEC10ecd | heavy chain = SEQ ID NO: 261 |
| (enfortumab) | light chain = SEQ ID NO: 258 |
| anti-nectin4-PD1ecd-SIRPaecd | heavy chain = SEQ ID NO: 261 |
| (enfortumab) | light chain = SEQ ID NO: 259 |
| anti-nectin4-PD1ecd-TIM3ecd | heavy chain = SEQ ID NO: 261 |
| (enfortumab) | light chain = SEQ ID NO: 260 |
| anti-nectin4-PD1ecd | heavy chain = SEQ ID NO: 261 |
| (enfortumab) | light chain = SEQ ID NO: 160 |
| anti-nectin4-SIGLEC10ecd-BTLAecd | heavy chain = SEQ ID NO: 263 |
| (enfortumab) | light chain = SEQ ID NO: 262 |
| anti-nectin4-SIGLEC10ecd-PD1ecd | heavy chain = SEQ ID NO: 263 |
| (enfortumab) | light chain = SEQ ID NO: 257 |
| anti-nectin4-SIGLEC10ecd-SIRPaecd | heavy chain = SEQ ID NO: 263 |
| (enfortumab) | light chain = SEQ ID NO: 259 |
| anti-nectin4-SIGLEC10ecd-TIM3ecd | heavy chain = SEQ ID NO: 263 |
| (enfortumab) | light chain = SEQ ID NO: 260 |
| anti-nectin4-SIGLEC10ecd | heavy chain = SEQ ID NO: 263 |
| (enfortumab) | light chain = SEQ ID NO: 160 |
| anti-nectin4-SIRPaecd-BTLAecd | heavy chain = SEQ ID NO: 264 |
| (enfortumab) | light chain = SEQ ID NO: 262 |
| anti-nectin4-SIRPaecd-PD1ecd | heavy chain = SEQ ID NO: 264 |
| (enfortumab) | light chain = SEQ ID NO: 257 |
| anti-nectin4-SIRPaecd-SIGLEC10ecd | heavy chain = SEQ ID NO: 264 |
| (enfortumab) | light chain = SEQ ID NO: 258 |
| anti-nectin4-SIRPaecd-TIM3ecd | heavy chain = SEQ ID NO: 264 |
| (enfortumab) | light chain = SEQ ID NO: 260 |
| anti-nectin4-SIRPaecd | heavy chain = SEQ ID NO: 264 |
| (enfortumab) | light chain = SEQ ID NO: 160 |
| anti-nectin4-TGFbRecd-BTLAecd | heavy chain = SEQ ID NO: 265 |
| (enfortumab) | light chain = SEQ ID NO: 262 |
| anti-nectin4-TGFbRecd-PD1ecd | heavy chain = SEQ ID NO: 265 |
| (enfortumab) | light chain = SEQ ID NO: 257 |
| anti-nectin4-TGFbRecd-SIGLEC10ecd | heavy chain = SEQ ID NO: 265 |
| (enfortumab) | light chain = SEQ ID NO: 258 |
| anti-nectin4-TGFbRecd-SIRPaecd | heavy chain = SEQ ID NO: 265 |
| (enfortumab) | light chain = SEQ ID NO: 259 |
| anti-nectin4-TGFbRecd-TIM3ecd | heavy chain = SEQ ID NO: 265 |
| (enfortumab) | light chain = SEQ ID NO: 260 |
| anti-nectin4-TGFbRecd | heavy chain = SEQ ID NO: 265 |
| (enfortumab) | light chain = SEQ ID NO: 160 |
| anti-nectin4-TIM3ecd-BTLAecd | heavy chain = SEQ ID NO: 266 |
| (enfortumab) | light chain = SEQ ID NO: 262 |
| anti-nectin4-TIM3ecd-PD1ecd | heavy chain = SEQ ID NO: 266 |
| (enfortumab) | light chain = SEQ ID NO: 257 |
| anti-nectin4-TIM3ecd-SIGLEC10ecd | heavy chain = SEQ ID NO: 266 |
| (enfortumab) | light chain = SEQ ID NO: 258 |
| anti-nectin4-TIM3ecd-SIRPaecd | heavy chain = SEQ ID NO: 266 |
| (enfortumab) | light chain = SEQ ID NO: 259 |
| anti-nectin4-TIM3ecd | heavy chain = SEQ ID NO: 266 |
| (enfortumab) | light chain = SEQ ID NO: 160 |
| anti-nectin4-VEGFRecd-BTLAecd | heavy chain = SEQ ID NO: 267 |
| (enfortumab) | light chain = SEQ ID NO: 262 |
| anti-nectin4-VEGFRecd-PD1ecd | heavy chain = SEQ ID NO: 267 |
| (enfortumab) | light chain = SEQ ID NO: 257 |
| anti-nectin4-VEGFRecd-SIGLEC10ecd | heavy chain = SEQ ID NO: 267 |
| (enfortumab) | light chain = SEQ ID NO: 258 |
| anti-nectin4-VEGFRecd-SIRPaecd | heavy chain = SEQ ID NO: 267 |
| (enfortumab) | light chain = SEQ ID NO: 259 |
| anti-nectin4-VEGFRecd-TIM3ecd | heavy chain = SEQ ID NO: 267 |
| (enfortumab) | light chain = SEQ ID NO: 260 |
| anti-nectin4-VEGFRecd | heavy chain = SEQ ID NO: 267 |
| (enfortumab) | light chain = SEQ ID NO: 160 |
| anti-uPAR-BTLAecd | heavy chain = SEQ ID NO: 268 |
| (ab1) | light chain = SEQ ID NO: 162 |
| anti-uPAR-PD1ecd | heavy chain = SEQ ID NO: 269 |
| (ab1) | light chain = SEQ ID NO: 162 |
| anti-uPAR-SIGLEC10ecd | heavy chain = SEQ ID NO: 270 |
| (ab1) | light chain = SEQ ID NO: 162 |
| anti-uPAR-SIRPaecd | heavy chain = SEQ ID NO: 271 |
| (ab1) | light chain = SEQ ID NO: 162 |
| anti-uPAR-TGFbRecd | heavy chain = SEQ ID NO: 272 |
| (ab1) | light chain = SEQ ID NO: 162 |
| anti-uPAR-TIM3ecd | heavy chain = SEQ ID NO: 273 |
| (ab1) | light chain = SEQ ID NO: 162 |
| anti-uPAR-VEGFRecd | heavy chain = SEQ ID NO: 274 |
| (ab1) | light chain = SEQ ID NO: 162 |
| anti-PSMA-BTLAecd | heavy chain = SEQ ID NO: 275 |
| (ab1) | light chain = SEQ ID NO: 121 |
| anti-PSMA-PD1ecd | heavy chain = SEQ ID NO: 276 |
| (ab1) | light chain = SEQ ID NO: 121 |
| anti-PSMA-SIGLEC10ecd | heavy chain = SEQ ID NO: 277 |
| (ab1) | light chain = SEQ ID NO: 121 |
| anti-PSMA-SIRPaecd | heavy chain = SEQ ID NO: 278 |
| (ab1) | light chain = SEQ ID NO: 121 |
| anti-PSMA-TGFbRecd | heavy chain = SEQ ID NO: 279 |
| (ab1) | light chain = SEQ ID NO: 121 |
| anti-PSMA-TIM3ecd | heavy chain = SEQ ID NO: 280 |
| (ab1) | light chain = SEQ ID NO: 121 |
| anti-PSMA-VEGFRecd | heavy chain = SEQ ID NO: 281 |
| (ab1) | light chain = SEQ ID NO: 121 |
| anti-CEACAM5-BTLAecd | heavy chain = SEQ ID NO: 282 |
| (labetuzumab) | light chain = SEQ ID NO: 26 |
| anti-CEACAM5-PD1ecd | heavy chain = SEQ ID NO: 283 |
| (labetuzumab) | light chain = SEQ ID NO: 26 |
| anti-CEACAM5-SIGLEC10ecd | heavy chain = SEQ ID NO: 284 |
| (labetuzumab) | light chain = SEQ ID NO: 26 |
| anti-CEACAM5-SIRPaecd | heavy chain = SEQ ID NO: 285 |
| (labetuzumab) | light chain = SEQ ID NO: 26 |
| anti-CEACAM5-TGFbRecd | heavy chain = SEQ ID NO: 286 |
| (labetuzumab) | light chain = SEQ ID NO: 26 |
| anti-CEACAM5-TIM3ecd | heavy chain = SEQ ID NO: 287 |
| (labetuzumab) | light chain = SEQ ID NO: 26 |
| anti-CEACAM5-VEGFRecd | heavy chain = SEQ ID NO: 288 |
| (labetuzumab) | light chain = SEQ ID NO: 26 |
| anti-CD38-BTLAecd-PD1ecd | heavy chain = SEQ ID NO: 289 |
| (daratumumab) | light chain = SEQ ID NO: 290 |
| anti-CD38-BTLAecd-SIGLEC10ecd | heavy chain = SEQ ID NO: 289 |
| (daratumumab) | light chain = SEQ ID NO: 291 |
| anti-CD38-BTLAecd-SIRPaecd | heavy chain = SEQ ID NO: 289 |
| (daratumumab) | light chain = SEQ ID NO: 292 |
| anti-CD38-BTLAecd-TIM3ecd | heavy chain = SEQ ID NO: 289 |
| (daratumumab) | light chain = SEQ ID NO: 293 |
| anti-CD38-BTLAecd | heavy chain = SEQ ID NO: 289 |
| (daratumumab) | light chain = SEQ ID NO: 16 |
| anti-CD38-PD1ecd-BTLAecd | heavy chain = SEQ ID NO: 294 |
| (daratumumab) | light chain = SEQ ID NO: 295 |
| anti-CD38-PD1ecd-SIGLEC10ecd | heavy chain = SEQ ID NO: 294 |
| (daratumumab) | light chain = SEQ ID NO: 291 |
| anti-CD38-PD1ecd-SIRPaecd | heavy chain = SEQ ID NO: 294 |
| (daratumumab) | light chain = SEQ ID NO: 292 |
| anti-CD38-PD1ecd-TIM3ecd | heavy chain = SEQ ID NO: 294 |
| (daratumumab) | light chain = SEQ ID NO: 293 |
| anti-CD38-PD1ecd | heavy chain = SEQ ID NO: 294 |
| (daratumumab) | light chain = SEQ ID NO: 16 |
| anti-CD38-SIGLEC10ecd-BTLAecd | heavy chain = SEQ ID NO: 296 |
| (daratumumab) | light chain = SEQ ID NO: 295 |
| anti-CD38-SIGLEC10ecd-PD1ecd | heavy chain = SEQ ID NO: 296 |
| (daratumumab) | light chain = SEQ ID NO: 290 |
| anti-CD38-SIGLEC10ecd-SIRPaecd | heavy chain = SEQ ID NO: 296 |
| (daratumumab) | light chain = SEQ ID NO: 292 |
| anti-CD38-SIGLEC10ecd-TIM3ecd | heavy chain = SEQ ID NO: 296 |
| (daratumumab) | light chain = SEQ ID NO: 293 |
| anti-CD38-SIGLEC10ecd | heavy chain = SEQ ID NO: 296 |
| (daratumumab) | light chain = SEQ ID NO: 16 |
| anti-CD38-SIRPaecd-BTLAecd | heavy chain = SEQ ID NO: 297 |
| (daratumumab) | light chain = SEQ ID NO: 295 |
| anti-CD38-SIRPaecd-PD1ecd | heavy chain = SEQ ID NO: 297 |
| (daratumumab) | light chain = SEQ ID NO: 290 |
| anti-CD38-SIRPaecd-SIGLEC10ecd | heavy chain = SEQ ID NO: 297 |
| (daratumumab) | light chain = SEQ ID NO: 291 |
| anti-CD38-SIRPaecd-TIM3ecd | heavy chain = SEQ ID NO: 297 |
| (daratumumab) | light chain = SEQ ID NO: 293 |
| anti-CD38-SIRPaecd | heavy chain = SEQ ID NO: 297 |
| (daratumumab) | light chain = SEQ ID NO: 16 |
| anti-CD38-TGFbRecd-BTLAecd | heavy chain = SEQ ID NO: 298 |
| (daratumumab) | light chain = SEQ ID NO: 295 |
| anti-CD38-TGFbRecd-PD1ecd | heavy chain = SEQ ID NO: 298 |
| (daratumumab) | light chain = SEQ ID NO: 290 |
| anti-CD38-TGFbRecd-SIGLEC10ecd | heavy chain = SEQ ID NO: 298 |
| (daratumumab) | light chain = SEQ ID NO: 291 |
| anti-CD38-TGFbRecd-SIRPaecd | heavy chain = SEQ ID NO: 298 |
| (daratumumab) | light chain = SEQ ID NO: 292 |
| anti-CD38-TGFbRecd-TIM3ecd | heavy chain = SEQ ID NO: 298 |
| (daratumumab) | light chain = SEQ ID NO: 293 |
| anti-CD38-TGFbRecd | heavy chain = SEQ ID NO: 298 |
| (daratumumab) | light chain = SEQ ID NO: 16 |
| anti-CD38-TIM3ecd-BTLAecd | heavy chain = SEQ ID NO: 299 |
| (daratumumab) | light chain = SEQ ID NO: 295 |
| anti-CD38-TIM3ecd-PD1ecd | heavy chain = SEQ ID NO: 299 |
| (daratumumab) | light chain = SEQ ID NO: 290 |
| anti-CD38-TIM3ecd-SIGLEC10ecd | heavy chain = SEQ ID NO: 299 |
| (daratumumab) | light chain = SEQ ID NO: 291 |
| anti-CD38-TIM3ecd-SIRPaecd | heavy chain = SEQ ID NO: 299 |
| (daratumumab) | light chain = SEQ ID NO: 292 |
| anti-CD38-TIM3ecd | heavy chain = SEQ ID NO: 299 |
| (daratumumab) | light chain = SEQ ID NO: 16 |
| anti-CD38-VEGFRecd-BTLAecd | heavy chain = SEQ ID NO: 300 |
| (daratumumab) | light chain = SEQ ID NO: 295 |
| anti-CD38-VEGFRecd-PD1ecd | heavy chain = SEQ ID NO: 300 |
| (daratumumab) | light chain = SEQ ID NO: 290 |
| anti-CD38-VEGFRecd-SIGLEC10ecd | heavy chain = SEQ ID NO: 300 |
| (daratumumab) | light chain = SEQ ID NO: 291 |
| anti-CD38-VEGFRecd-SIRPaecd | heavy chain = SEQ ID NO: 300 |
| (daratumumab) | light chain = SEQ ID NO: 292 |
| anti-CD38-VEGFRecd-TIM3ecd | heavy chain = SEQ ID NO: 300 |
| (daratumumab) | light chain = SEQ ID NO: 293 |
| anti-CD38-VEGFRecd | heavy chain = SEQ ID NO: 300 |
| (daratumumab) | light chain = SEQ ID NO: 16 |
| anti-SLAMF7-BTLAecd-PD1ecd | heavy chain = SEQ ID NO: 301 |
| (elotuzumab) | light chain = SEQ ID NO: 302 |
| anti-SLAMF7-BTLAecd-SIGLEC10ecd | heavy chain = SEQ ID NO: 301 |
| (elotuzumab) | light chain = SEQ ID NO: 303 |
| anti-SLAMF7-BTLAecd-SIRPaecd | heavy chain = SEQ ID NO: 301 |
| (elotuzumab) | light chain = SEQ ID NO: 304 |
| anti-SLAMF7-BTLAecd-TIM3ecd | heavy chain = SEQ ID NO: 301 |
| (elotuzumab) | light chain = SEQ ID NO: 305 |
| anti-SLAMF7-BTLAecd | heavy chain = SEQ ID NO: 301 |
| (elotuzumab) | light chain = SEQ ID NO: 127 |
| anti-SLAMF7-PD1ecd-BTLAecd | heavy chain = SEQ ID NO: 306 |
| (elotuzumab) | light chain = SEQ ID NO: 307 |
| anti-SLAMF7-PD1ecd-SIGLEC10ecd | heavy chain = SEQ ID NO: 306 |
| (elotuzumab) | light chain = SEQ ID NO: 303 |
| anti-SLAMF7-PD1ecd-SIRPaecd | heavy chain = SEQ ID NO: 306 |
| (elotuzumab) | light chain = SEQ ID NO: 304 |
| anti-SLAMF7-PD1ecd-TIM3ecd | heavy chain = SEQ ID NO: 306 |
| (elotuzumab) | light chain = SEQ ID NO: 305 |
| anti-SLAMF7-PD1ecd | heavy chain = SEQ ID NO: 306 |
| (elotuzumab) | light chain = SEQ ID NO: 127 |
| anti-SLAMF7-SIGLEC10ecd-BTLAecd | heavy chain = SEQ ID NO: 308 |
| (elotuzumab) | light chain = SEQ ID NO: 307 |
| anti-SLAMF7-SIGLEC10ecd-PD1ecd | heavy chain = SEQ ID NO: 308 |
| (elotuzumab) | light chain = SEQ ID NO: 302 |
| anti-SLAMF7-SIGLEC10ecd-SIRPaecd | heavy chain = SEQ ID NO: 308 |
| (elotuzumab) | light chain = SEQ ID NO: 304 |
| anti-SLAMF7-SIGLEC10ecd-TIM3ecd | heavy chain = SEQ ID NO: 308 |
| (elotuzumab) | light chain = SEQ ID NO: 305 |
| anti-SLAMF7-SIGLEC10ecd | heavy chain = SEQ ID NO: 308 |
| (elotuzumab) | light chain = SEQ ID NO: 127 |
| anti-SLAMF7-SIRPaecd-BTLAecd | heavy chain = SEQ ID NO: 309 |
| (elotuzumab) | light chain = SEQ ID NO: 307 |
| anti-SLAMF7-SIRPaecd-PD1ecd | heavy chain = SEQ ID NO: 309 |
| (elotuzumab) | light chain = SEQ ID NO: 302 |
| anti-SLAMF7-SIRPaecd-SIGLEC10ecd | heavy chain = SEQ ID NO: 309 |
| (elotuzumab) | light chain = SEQ ID NO: 303 |
| anti-SLAMF7-SIRPaecd-TIM3ecd | heavy chain = SEQ ID NO: 309 |
| (elotuzumab) | light chain = SEQ ID NO: 305 |
| anti-SLAMF7-SIRPaecd | heavy chain = SEQ ID NO: 309 |
| (elotuzumab) | light chain = SEQ ID NO: 127 |
| anti-SLAMF7-TGFbRecd-BTLAecd | heavy chain = SEQ ID NO: 310 |
| (elotuzumab) | light chain = SEQ ID NO: 307 |
| anti-SLAMF7-TGFbRecd-PD1ecd | heavy chain = SEQ ID NO: 310 |
| (elotuzumab) | light chain = SEQ ID NO: 302 |
| anti-SLAMF7-TGFbRecd-SIGLEC10ecd | heavy chain = SEQ ID NO: 310 |
| (elotuzumab) | light chain = SEQ ID NO: 303 |
| anti-SLAMF7-TGFbRecd-SIRPaecd | heavy chain = SEQ ID NO: 310 |
| (elotuzumab) | light chain = SEQ ID NO: 304 |
| anti-SLAMF7-TGFbRecd-TIM3ecd | heavy chain = SEQ ID NO: 310 |
| (elotuzumab) | light chain = SEQ ID NO: 305 |
| anti-SLAMF7-TGFbRecd | heavy chain = SEQ ID NO: 310 |
| (elotuzumab) | light chain = SEQ ID NO: 127 |
| anti-SLAMF7-TIM3ecd-BTLAecd | heavy chain = SEQ ID NO: 311 |
| (elotuzumab) | light chain = SEQ ID NO: 307 |
| anti-SLAMF7-TIM3ecd-PD1ecd | heavy chain = SEQ ID NO: 311 |
| (elotuzumab) | light chain = SEQ ID NO: 302 |
| anti-SLAMF7-TIM3ecd-SIGLEC10ecd | heavy chain = SEQ ID NO: 311 |
| (elotuzumab) | light chain = SEQ ID NO: 303 |
| anti-SLAMF7-TIM3ecd-SIRPaecd | heavy chain = SEQ ID NO: 311 |
| (elotuzumab) | light chain = SEQ ID NO: 304 |
| anti-SLAMF7-TIM3ecd | heavy chain = SEQ ID NO: 311 |
| (elotuzumab) | light chain = SEQ ID NO: 127 |
| anti-SLAMF7-VEGFRecd-BTLAecd | heavy chain = SEQ ID NO: 312 |
| (elotuzumab) | light chain = SEQ ID NO: 307 |
| anti-SLAMF7-VEGFRecd-PD1ecd | heavy chain = SEQ ID NO: 312 |
| (elotuzumab) | light chain = SEQ ID NO: 302 |
| anti-SLAMF7-VEGFRecd-SIGLEC10ecd | heavy chain = SEQ ID NO: 312 |
| (elotuzumab) | light chain = SEQ ID NO: 303 |
| anti-SLAMF7-VEGFRecd-SIRPaecd | heavy chain = SEQ ID NO: 312 |
| (elotuzumab) | light chain = SEQ ID NO: 304 |
| anti-SLAMF7-VEGFRecd-TIM3ecd | heavy chain = SEQ ID NO: 312 |
| (elotuzumab) | light chain = SEQ ID NO: 305 |
| anti-SLAMF7-VEGFRecd | heavy chain = SEQ ID NO: 312 |
| (elotuzumab) | light chain = SEQ ID NO: 127 |
| anti-IL6R-BTLAecd-PD1ecd | heavy chain = SEQ ID NO: 313 |
| (tocilizumab) | light chain = SEQ ID NO: 314 |
| anti-IL6R-BTLAecd-SIGLEC10ecd | heavy chain = SEQ ID NO: 313 |
| (tocilizumab) | light chain = SEQ ID NO: 315 |
| anti-IL6R-BTLAecd-SIRPaecd | heavy chain = SEQ ID NO: 313 |
| (tocilizumab) | light chain = SEQ ID NO: 316 |
| anti-IL6R-BTLAecd-TIM3ecd | heavy chain = SEQ ID NO: 313 |
| (tocilizumab) | light chain = SEQ ID NO: 317 |
| anti-IL6R-BTLAecd | heavy chain = SEQ ID NO: 313 |
| (tocilizumab) | light chain = SEQ ID NO: 79 |
| anti-IL6R-PD1ecd-BTLAecd | heavy chain = SEQ ID NO: 318 |
| (tocilizumab) | light chain = SEQ ID NO: 319 |
| anti-IL6R-PD1ecd-SIGLEC10ecd | heavy chain = SEQ ID NO: 318 |
| (tocilizumab) | light chain = SEQ ID NO: 315 |
| anti-IL6R-PD1ecd-SIRPaecd | heavy chain = SEQ ID NO: 318 |
| (tocilizumab) | light chain = SEQ ID NO: 316 |
| anti-IL6R-PD1ecd-TIM3ecd | heavy chain = SEQ ID NO: 318 |
| (tocilizumab) | light chain = SEQ ID NO: 317 |
| anti-IL6R-PD1ecd | heavy chain = SEQ ID NO: 318 |
| (tocilizumab) | light chain = SEQ ID NO: 79 |
| anti-IL6R-SIGLEC10ecd-BTLAecd | heavy chain = SEQ ID NO: 320 |
| (tocilizumab) | light chain = SEQ ID NO: 319 |
| anti-IL6R-SIGLEC10ecd-PD1ecd | heavy chain = SEQ ID NO: 320 |
| (tocilizumab) | light chain = SEQ ID NO: 314 |
| anti-IL6R-SIGLEC10ecd-SIRPaecd | heavy chain = SEQ ID NO: 320 |
| (tocilizumab) | light chain = SEQ ID NO: 316 |
| anti-IL6R-SIGLEC10ecd-TIM3ecd | heavy chain = SEQ ID NO: 320 |
| (tocilizumab) | light chain = SEQ ID NO: 317 |
| anti-IL6R-SIGLEC10ecd | heavy chain = SEQ ID NO: 320 |
| (tocilizumab) | light chain = SEQ ID NO: 79 |
| anti-IL6R-SIRPaecd-BTLAecd | heavy chain = SEQ ID NO: 321 |
| (tocilizumab) | light chain = SEQ ID NO: 319 |
| anti-IL6R-SIRPaecd-PD1ecd | heavy chain = SEQ ID NO: 321 |
| (tocilizumab) | light chain = SEQ ID NO: 314 |
| anti-IL6R-SIRPaecd-SIGLEC10ecd | heavy chain = SEQ ID NO: 321 |
| (tocilizumab) | light chain = SEQ ID NO: 315 |
| anti-IL6R-SIRPaecd-TIM3ecd | heavy chain = SEQ ID NO: 321 |
| (tocilizumab) | light chain = SEQ ID NO: 317 |
| anti-IL6R-SIRPaecd | heavy chain = SEQ ID NO: 321 |
| (tocilizumab) | light chain = SEQ ID NO: 79 |
| anti-IL6R-TGFbRecd-BTLAecd | heavy chain = SEQ ID NO: 322 |
| (tocilizumab) | light chain = SEQ ID NO: 319 |
| anti-IL6R-TGFbRecd-PD1ecd | heavy chain = SEQ ID NO: 322 |
| (tocilizumab) | light chain = SEQ ID NO: 314 |
| anti-IL6R-TGFbRecd-SIGLEC10ecd | heavy chain = SEQ ID NO: 322 |
| (tocilizumab) | light chain = SEQ ID NO: 315 |
| anti-IL6R-TGFbRecd-SIRPaecd | heavy chain = SEQ ID NO: 322 |
| (tocilizumab) | light chain = SEQ ID NO: 316 |
| anti-IL6R-TGFbRecd-TIM3ecd | heavy chain = SEQ ID NO: 322 |
| (tocilizumab) | light chain = SEQ ID NO: 317 |
| anti-IL6R-TGFbRecd | heavy chain = SEQ ID NO: 322 |
| (tocilizumab) | light chain = SEQ ID NO: 79 |
| anti-IL6R-TIM3ecd-BTLAecd | heavy chain = SEQ ID NO: 323 |
| (tocilizumab) | light chain = SEQ ID NO: 319 |
| anti-IL6R-TIM3ecd-PD1ecd | heavy chain = SEQ ID NO: 323 |
| (tocilizumab) | light chain = SEQ ID NO: 314 |
| anti-IL6R-TIM3ecd-SIGLEC10ecd | heavy chain = SEQ ID NO: 323 |
| (tocilizumab) | light chain = SEQ ID NO: 315 |
| anti-IL6R-TIM3ecd-SIRPaecd | heavy chain = SEQ ID NO: 323 |
| (tocilizumab) | light chain = SEQ ID NO: 316 |
| anti-IL6R-TIM3ecd | heavy chain = SEQ ID NO: 323 |
| (tocilizumab) | light chain = SEQ ID NO: 79 |
| anti-IL6R-VEGFRecd-BTLAecd | heavy chain = SEQ ID NO: 324 |
| (tocilizumab) | light chain = SEQ ID NO: 319 |
| anti-IL6R-VEGFRecd-PD1ecd | heavy chain = SEQ ID NO: 324 |
| (tocilizumab) | light chain = SEQ ID NO: 314 |
| anti-IL6R-VEGFRecd-SIGLEC10ecd | heavy chain = SEQ ID NO: 324 |
| (tocilizumab) | light chain = SEQ ID NO: 315 |
| anti-IL6R-VEGFRecd-SIRPaecd | heavy chain = SEQ ID NO: 324 |
| (tocilizumab) | light chain = SEQ ID NO: 316 |
| anti-IL6R-VEGFRecd-TIM3ecd | heavy chain = SEQ ID NO: 324 |
| (tocilizumab) | light chain = SEQ ID NO: 317 |
| anti-IL6R-VEGFRecd | heavy chain = SEQ ID NO: 324 |
| (tocilizumab) | light chain = SEQ ID NO: 79 |
| anti-IL17R-BTLAecd-PD1ecd | heavy chain = SEQ ID NO: 325 |
| (brodalumab) | light chain = SEQ ID NO: 326 |
| anti-IL17R-BTLAecd-SIGLEC10ecd | heavy chain = SEQ ID NO: 325 |
| (brodalumab) | light chain = SEQ ID NO: 327 |
| anti-IL17R-BTLAecd-SIRPaecd | heavy chain = SEQ ID NO: 325 |
| (brodalumab) | light chain = SEQ ID NO: 328 |
| anti-IL17R-BTLAecd-TIM3ecd | heavy chain = SEQ ID NO: 325 |
| (brodalumab) | light chain = SEQ ID NO: 329 |
| anti-IL17R-BTLAecd | heavy chain = SEQ ID NO: 325 |
| (brodalumab) | light chain = SEQ ID NO: 63 |
| anti-IL17R-PD1ecd-BTLAecd | heavy chain = SEQ ID NO: 330 |
| (brodalumab) | light chain = SEQ ID NO: 331 |
| anti-IL17R-PD1ecd-SIGLEC10ecd | heavy chain = SEQ ID NO: 330 |
| (brodalumab) | light chain = SEQ ID NO: 327 |
| anti-IL17R-PD1ecd-SIRPaecd | heavy chain = SEQ ID NO: 330 |
| (brodalumab) | light chain = SEQ ID NO: 328 |
| anti-IL17R-PD1ecd-TIM3ecd | heavy chain = SEQ ID NO: 330 |
| (brodalumab) | light chain = SEQ ID NO: 329 |
| anti-IL17R-PD1ecd | heavy chain = SEQ ID NO: 330 |
| (brodalumab) | light chain = SEQ ID NO: 63 |
| anti-IL17R-SIGLEC10cd-BTLAecd | heavy chain = SEQ ID NO: 332 |
| (brodalumab) | light chain = SEQ ID NO: 331 |
| anti-IL17R-SIGLEC10cd-PD1ecd | heavy chain = SEQ ID NO: 332 |
| (brodalumab) | light chain = SEQ ID NO: 326 |
| anti-IL17R-SIGLEC10ecd-SIRPaecd | heavy chain = SEQ ID NO: 332 |
| (brodalumab) | light chain = SEQ ID NO: 328 |
| anti-IL17R-SIGLEC10ecd-TIM3ecd | heavy chain = SEQ ID NO: 332 |
| (brodalumab) | light chain = SEQ ID NO: 329 |
| anti-IL17R-SIGLEC10ecd | heavy chain = SEQ ID NO: 332 |
| (brodalumab) | light chain = SEQ ID NO: 63 |
| anti-IL17R-SIRPaecd-BTLAecd | heavy chain = SEQ ID NO: 333 |
| (brodalumab) | light chain = SEQ ID NO: 331 |
| anti-IL17R-SIRPaecd-PD1ecd | heavy chain = SEQ ID NO: 333 |
| (brodalumab) | light chain = SEQ ID NO: 326 |
| anti-IL17R-SIRPaecd-SIGLEC10ecd | heavy chain = SEQ ID NO: 333 |
| (brodalumab) | light chain = SEQ ID NO: 327 |
| anti-IL17R-SIRPaecd-TIM3ecd | heavy chain = SEQ ID NO: 333 |
| (brodalumab) | light chain = SEQ ID NO: 329 |
| anti-IL17R-SIRPaecd | heavy chain = SEQ ID NO: 333 |
| (brodalumab) | light chain = SEQ ID NO: 63 |
| anti-IL17R-TGFbRecd-BTLAecd | heavy chain = SEQ ID NO: 334 |
| (brodalumab) | light chain = SEQ ID NO: 331 |
| anti-IL17R-TGFbRecd-PD1ecd | heavy chain = SEQ ID NO: 334 |
| (brodalumab) | light chain = SEQ ID NO: 326 |
| anti-IL17R-TGFbRecd-SIGLEC10ecd | heavy chain = SEQ ID NO: 334 |
| (brodalumab) | light chain = SEQ ID NO: 327 |
| anti-IL17R-TGFbRecd-SIRPaecd | heavy chain = SEQ ID NO: 334 |
| (brodalumab) | light chain = SEQ ID NO: 328 |
| anti-IL17R-TGFbRecd-TIM3ecd | heavy chain = SEQ ID NO: 334 |
| (brodalumab) | light chain = SEQ ID NO: 329 |
| anti-IL17R-TGFbRecd | heavy chain = SEQ ID NO: 334 |
| (brodalumab) | light chain = SEQ ID NO: 63 |
| anti-IL17R-TIM3ecd-BTLAecd | heavy chain = SEQ ID NO: 335 |
| (brodalumab) | light chain = SEQ ID NO: 331 |
| anti-IL17R-TIM3ecd-PD1ecd | heavy chain = SEQ ID NO: 335 |
| (brodalumab) | light chain = SEQ ID NO: 326 |
| anti-IL17R-TIM3ecd-SIGLEC10ecd | heavy chain = SEQ ID NO: 335 |
| (brodalumab) | light chain = SEQ ID NO: 327 |
| anti-IL17R-TIM3ecd-SIRPaecd | heavy chain = SEQ ID NO: 335 |
| (brodalumab) | light chain = SEQ ID NO: 328 |
| anti-IL17R-TIM3ecd | heavy chain = SEQ ID NO: 335 |
| (brodalumab) | light chain = SEQ ID NO: 63 |
| anti-IL17R-VEGFRecd-BTLAecd | heavy chain = SEQ ID NO: 336 |
| (brodalumab) | light chain = SEQ ID NO: 331 |
| anti-IL17R-VEGFRecd-PD1ecd | heavy chain = SEQ ID NO: 336 |
| (brodalumab) | light chain = SEQ ID NO: 326 |
| anti-IL17R-VEGFRecd-SIGLEC10ecd | heavy chain = SEQ ID NO: 336 |
| (brodalumab) | light chain = SEQ ID NO: 327 |
| anti-IL17R-VEGFRecd-SIRPaecd | heavy chain = SEQ ID NO: 336 |
| (brodalumab) | light chain = SEQ ID NO: 328 |
| anti-IL17R-VEGFRecd-TIM3ecd | heavy chain = SEQ ID NO: 336 |
| (brodalumab) | light chain = SEQ ID NO: 329 |
| anti-IL17R-VEGFRecd | heavy chain = SEQ ID NO: 336 |
| (brodalumab) | light chain = SEQ ID NO: 63 |
| anti-IL23-BTLAecd-PD1ecd | heavy chain = SEQ ID NO: 337 |
| (risankizumab) | light chain = SEQ ID NO: 338 |
| anti-IL23-BTLAecd-SIGLEC10ecd | heavy chain = SEQ ID NO: 337 |
| (risankizumab) | light chain = SEQ ID NO: 339 |
| anti-IL23-BTLAecd-SIRPaecd | heavy chain = SEQ ID NO: 337 |
| (risankizumab) | light chain = SEQ ID NO: 340 |
| anti-IL23-BTLAecd-TIM3ecd | heavy chain = SEQ ID NO: 337 |
| (risankizumab) | light chain = SEQ ID NO: 341 |
| anti-IL23-BTLAecd | heavy chain = SEQ ID NO: 337 |
| (risankizumab) | light chain = SEQ ID NO: 75 |
| anti-IL23-PD1ecd-BTLAecd | heavy chain = SEQ ID NO: 342 |
| (risankizumab) | light chain = SEQ ID NO: 343 |
| anti-IL23-PD1ecd-SIGLEC10ecd | heavy chain = SEQ ID NO: 342 |
| (risankizumab) | light chain = SEQ ID NO: 339 |
| anti-IL23-PD1ecd-SIRPaecd | heavy chain = SEQ ID NO: 342 |
| (risankizumab) | light chain = SEQ ID NO: 340 |
| anti-IL23-PD1ecd-TIM3ecd | heavy chain = SEQ ID NO: 342 |
| (risankizumab) | light chain = SEQ ID NO: 341 |
| anti-IL23-PD1ecd | heavy chain = SEQ ID NO: 342 |
| (risankizumab) | light chain = SEQ ID NO: 75 |
| anti-IL23-SIGLEC10ecd-BTLAecd | heavy chain = SEQ ID NO: 344 |
| (risankizumab) | light chain = SEQ ID NO: 343 |
| anti-IL23-SIGLEC10ecd-PD1ecd | heavy chain = SEQ ID NO: 344 |
| (risankizumab) | light chain = SEQ ID NO: 338 |
| anti-IL23-SIGLEC10ecd-SIRPaecd | heavy chain = SEQ ID NO: 344 |
| (risankizumab) | light chain = SEQ ID NO: 340 |
| anti-IL23-SIGLEC10ecd-TIM3ecd | heavy chain = SEQ ID NO: 344 |
| (risankizumab) | light chain = SEQ ID NO: 341 |
| anti-IL23-SIGLEC10ecd | heavy chain = SEQ ID NO: 344 |
| (risankizumab) | light chain = SEQ ID NO: 75 |
| anti-IL23-SIRPaecd-BTLAecd | heavy chain = SEQ ID NO: 345 |
| (risankizumab) | light chain = SEQ ID NO: 343 |
| anti-IL23-SIRPaecd-PD1ecd | heavy chain = SEQ ID NO: 345 |
| (risankizumab) | light chain = SEQ ID NO: 338 |
| anti-IL23-SIRPaecd-SIGLEC10ecd | heavy chain = SEQ ID NO: 345 |
| (risankizumab) | light chain = SEQ ID NO: 339 |
| anti-IL23-SIRPaecd-TIM3ecd | heavy chain = SEQ ID NO: 345 |
| (risankizumab) | light chain = SEQ ID NO: 341 |
| anti-IL23-SIRPaecd | heavy chain = SEQ ID NO: 345 |
| (risankizumab) | light chain = SEQ ID NO: 75 |
| anti-IL23-TGFbRecd-BTLAecd | heavy chain = SEQ ID NO: 346 |
| (risankizumab) | light chain = SEQ ID NO: 343 |
| anti-IL23-TGFbRecd-PD1ecd | heavy chain = SEQ ID NO: 346 |
| (risankizumab) | light chain = SEQ ID NO: 338 |
| anti-IL23-TGFbRecd-SIGLEC10ecd | heavy chain = SEQ ID NO: 346 |
| (risankizumab) | light chain = SEQ ID NO: 339 |
| anti-IL23-TGFbRecd-SIRPaecd | heavy chain = SEQ ID NO: 346 |
| (risankizumab) | light chain = SEQ ID NO: 340 |
| anti-IL23-TGFbRecd-TIM3ecd | heavy chain = SEQ ID NO: 346 |
| (risankizumab) | light chain = SEQ ID NO: 341 |
| anti-IL23-TGFbRecd | heavy chain = SEQ ID NO: 346 |
| (risankizumab) | light chain = SEQ ID NO: 75 |
| anti-IL23-TIM3ecd-BTLAecd | heavy chain = SEQ ID NO: 347 |
| (risankizumab) | light chain = SEQ ID NO: 343 |
| anti-IL23-TIM3ecd-PD1ecd | heavy chain = SEQ ID NO: 347 |
| (risankizumab) | light chain = SEQ ID NO: 338 |
| anti-IL23-TIM3ecd-SIGLEC10ecd | heavy chain = SEQ ID NO: 347 |
| (risankizumab) | light chain = SEQ ID NO: 339 |
| anti-IL23-TIM3ecd-SIRPaecd | heavy chain = SEQ ID NO: 347 |
| (risankizumab) | light chain = SEQ ID NO: 340 |
| anti-IL23-TIM3ecd | heavy chain = SEQ ID NO: 347 |
| (risankizumab) | light chain = SEQ ID NO: 75 |
| anti-IL23-VEGFRecd-BTLAecd | heavy chain = SEQ ID NO: 348 |
| (risankizumab) | light chain = SEQ ID NO: 343 |
| anti-IL23-VEGFRecd-PD1ecd | heavy chain = SEQ ID NO: 348 |
| (risankizumab) | light chain = SEQ ID NO: 338 |
| anti-IL23-VEGFRecd-SIGLEC10ecd | heavy chain = SEQ ID NO: 348 |
| (risankizumab) | light chain = SEQ ID NO: 339 |
| anti-IL23-VEGFRecd-SIRPaecd | heavy chain = SEQ ID NO: 348 |
| (risankizumab) | light chain = SEQ ID NO: 340 |
| anti-IL23-VEGFRecd-TIM3ecd | heavy chain = SEQ ID NO: 348 |
| (risankizumab) | light chain = SEQ ID NO: 341 |
| anti-IL23-VEGFRecd | heavy chain = SEQ ID NO: 348 |
| (risankizumab) | light chain = SEQ ID NO: 75 |
| anti-IL1b-BTLAecd-PD1ecd | heavy chain = SEQ ID NO: 349 |
| (canakinumab) | light chain = SEQ ID NO: 350 |
| anti-IL1b-BTLAecd-SIGLEC10ecd | heavy chain = SEQ ID NO: 349 |
| (canakinumab) | light chain = SEQ ID NO: 351 |
| anti-IL1b-BTLAecd-SIRPaecd | heavy chain = SEQ ID NO: 349 |
| (canakinumab) | light chain = SEQ ID NO: 352 |
| anti-IL1b-BTLAecd-TIM3ecd | heavy chain = SEQ ID NO: 349 |
| (canakinumab) | light chain = SEQ ID NO: 353 |
| anti-IL1b-BTLAecd | heavy chain = SEQ ID NO: 349 |
| (canakinumab) | light chain = SEQ ID NO: 69 |
| anti-IL1b-PD1ecd-BTLAecd | heavy chain = SEQ ID NO: 354 |
| (canakinumab) | light chain = SEQ ID NO: 355 |
| anti-IL1b-PD1ecd-SIGLEC10ecd | heavy chain = SEQ ID NO: 354 |
| (canakinumab) | light chain = SEQ ID NO: 351 |
| anti-IL1b-PD1ecd-SIRPaecd | heavy chain = SEQ ID NO: 354 |
| (canakinumab) | light chain = SEQ ID NO: 352 |
| anti-IL1b-PD1ecd-TIM3ecd | heavy chain = SEQ ID NO: 354 |
| (canakinumab) | light chain = SEQ ID NO: 353 |
| anti-IL1b-PD1ecd | heavy chain = SEQ ID NO: 354 |
| (canakinumab) | light chain = SEQ ID NO: 69 |
| anti-IL1b-SIGLEC10ecd-BTLAecd | heavy chain = SEQ ID NO: 356 |
| (canakinumab) | light chain = SEQ ID NO: 355 |
| anti-IL1b-SIGLEC10ecd-PD1ecd | heavy chain = SEQ ID NO: 356 |
| (canakinumab) | light chain = SEQ ID NO: 350 |
| anti-IL1b-SIGLEC10ecd-SIRPaecd | heavy chain = SEQ ID NO: 356 |
| (canakinumab) | light chain = SEQ ID NO: 352 |
| anti-IL1b-SIGLEC10ecd-TIM3ecd | heavy chain = SEQ ID NO: 356 |
| (canakinumab) | light chain = SEQ ID NO: 353 |
| anti-IL1b-SIGLEC10ecd | heavy chain = SEQ ID NO: 356 |
| (canakinumab) | light chain = SEQ ID NO: 69 |
| anti-IL1b-SIRPaecd-BTLAecd | heavy chain = SEQ ID NO: 357 |
| (canakinumab) | light chain = SEQ ID NO: 355 |
| anti-IL1b-SIRPaecd-PD1ecd | heavy chain = SEQ ID NO: 357 |
| (canakinumab) | light chain = SEQ ID NO: 350 |
| anti-IL1b-SIRPaecd-SIGLEC10ecd | heavy chain = SEQ ID NO: 357 |
| (canakinumab) | light chain = SEQ ID NO: 351 |
| anti-IL1b-SIRPaecd-TIM3ecd | heavy chain = SEQ ID NO: 357 |
| (canakinumab) | light chain = SEQ ID NO: 353 |
| anti-IL1b-SIRPaecd | heavy chain = SEQ ID NO: 357 |
| (canakinumab) | light chain = SEQ ID NO: 69 |
| anti-IL1b-TGFbRecd-BTLAecd | heavy chain = SEQ ID NO: 358 |
| (canakinumab) | light chain = SEQ ID NO: 355 |
| anti-IL1b-TGFbRecd-PD1ecd | heavy chain = SEQ ID NO: 358 |
| (canakinumab) | light chain = SEQ ID NO: 350 |
| anti-IL1b-TGFbRecd-SIGLEC10ecd | heavy chain = SEQ ID NO: 358 |
| (canakinumab) | light chain = SEQ ID NO: 351 |
| anti-IL1b-TGFbRecd-SIRPaecd | heavy chain = SEQ ID NO: 358 |
| (canakinumab) | light chain = SEQ ID NO: 352 |
| anti-IL1b-TGFbRecd-TIM3ecd | heavy chain = SEQ ID NO: 358 |
| (canakinumab) | light chain = SEQ ID NO: 353 |
| anti-IL1b-TGFbRecd | heavy chain = SEQ ID NO: 358 |
| (canakinumab) | light chain = SEQ ID NO: 69 |
| anti-IL1b-TIM3ecd-BTLAecd | heavy chain = SEQ ID NO: 359 |
| (canakinumab) | light chain = SEQ ID NO: 355 |
| anti-IL1b-TIM3ecd-PD1ecd | heavy chain = SEQ ID NO: 359 |
| (canakinumab) | light chain = SEQ ID NO: 350 |
| anti-IL1b-TIM3ecd-SIGLEC10ecd | heavy chain = SEQ ID NO: 359 |
| (canakinumab) | light chain = SEQ ID NO: 351 |
| anti-IL1b-TIM3ecd-SIRPaecd | heavy chain = SEQ ID NO: 359 |
| (canakinumab) | light chain = SEQ ID NO: 352 |
| anti-IL1b-TIM3ecd | heavy chain = SEQ ID NO: 359 |
| (canakinumab) | light chain = SEQ ID NO: 69 |
| anti-IL1b-VEGFRecd-BTLAecd | heavy chain = SEQ ID NO: 360 |
| (canakinumab) | light chain = SEQ ID NO: 355 |
| anti-IL1b-VEGFRecd-PD1ecd | heavy chain = SEQ ID NO: 360 |
| (canakinumab) | light chain = SEQ ID NO: 350 |
| anti-IL1b-VEGFRecd-SIGLEC10ecd | heavy chain = SEQ ID NO: 360 |
| (canakinumab) | light chain = SEQ ID NO: 351 |
| anti-IL1b-VEGFRecd-SIRPaecd | heavy chain = SEQ ID NO: 360 |
| (canakinumab) | light chain = SEQ ID NO: 352 |
| anti-IL1b-VEGFRecd-TIM3ecd | heavy chain = SEQ ID NO: 360 |
| (canakinumab) | light chain = SEQ ID NO: 353 |
| anti-IL1b-VEGFRecd | heavy chain = SEQ ID NO: 360 |
| (canakinumab) | light chain = SEQ ID NO: 69 |
| anti-VEGF-BTLAecd-PD1ecd | heavy chain = SEQ ID NO: 361 |
| (bevacizumab) | light chain = SEQ ID NO: 362 |
| anti-VEGF-BTLAecd-SIGLEC10ecd | heavy chain = SEQ ID NO: 361 |
| (bevacizumab) | light chain = SEQ ID NO: 363 |
| anti-VEGF-BTLAecd-SIRPaecd | heavy chain = SEQ ID NO: 361 |
| (bevacizumab) | light chain = SEQ ID NO: 364 |
| anti-VEGF-BTLAecd-TIM3ecd | heavy chain = SEQ ID NO: 361 |
| (bevacizumab) | light chain = SEQ ID NO: 365 |
| anti-VEGF-BTLAecd | heavy chain = SEQ ID NO: 361 |
| (bevacizumab) | light chain = SEQ ID NO: 32 |
| anti-VEGF-PD1ecd-BTLAecd | heavy chain = SEQ ID NO: 366 |
| (bevacizumab) | light chain = SEQ ID NO: 367 |
| anti-VEGF-PD1ecd-SIGLEC10ecd | heavy chain = SEQ ID NO: 366 |
| (bevacizumab) | light chain = SEQ ID NO: 363 |
| anti-VEGF-PD1ecd-SIRPaecd | heavy chain = SEQ ID NO: 366 |
| (bevacizumab) | light chain = SEQ ID NO: 364 |
| anti-VEGF-PD1ecd-TIM3ecd | heavy chain = SEQ ID NO: 366 |
| (bevacizumab) | light chain = SEQ ID NO: 365 |
| anti-VEGF-PD1ecd | heavy chain = SEQ ID NO: 366 |
| (bevacizumab) | light chain = SEQ ID NO: 32 |
| anti-VEGF-SIGLEC10ecd-BTLAecd | heavy chain = SEQ ID NO: 368 |
| (bevacizumab) | light chain = SEQ ID NO: 367 |
| anti-VEGF-SIGLEC10ecd-PD1ecd | heavy chain = SEQ ID NO: 368 |
| (bevacizumab) | light chain = SEQ ID NO: 362 |
| anti-VEGF-SIGLEC10ecd-SIRPaecd | heavy chain = SEQ ID NO: 368 |
| (bevacizumab) | light chain = SEQ ID NO: 364 |
| anti-VEGF-SIGLEC10ecd-TIM3ecd | heavy chain = SEQ ID NO: 368 |
| (bevacizumab) | light chain = SEQ ID NO: 365 |
| anti-VEGF-SIGLEC10ecd | heavy chain = SEQ ID NO: 368 |
| (bevacizumab) | light chain = SEQ ID NO: 32 |
| anti-VEGF-SIRPaecd-BTLAecd | heavy chain = SEQ ID NO: 369 |
| (bevacizumab) | light chain = SEQ ID NO: 367 |
| anti-VEGF-SIRPaecd-PD1ecd | heavy chain = SEQ ID NO: 369 |
| (bevacizumab) | light chain = SEQ ID NO: 362 |
| anti-VEGF-SIRPaecd-SIGLEC10ecd | heavy chain = SEQ ID NO: 369 |
| (bevacizumab) | light chain = SEQ ID NO: 363 |
| anti-VEGF-SIRPaecd-TIM3ecd | heavy chain = SEQ ID NO: 369 |
| (bevacizumab) | light chain = SEQ ID NO: 365 |
| anti-VEGF-SIRPaecd | heavy chain = SEQ ID NO: 369 |
| (bevacizumab) | light chain = SEQ ID NO: 32 |
| anti-VEGF-TGFbRecd-BTLAecd | heavy chain = SEQ ID NO: 370 |
| (bevacizumab) | light chain = SEQ ID NO: 367 |
| anti-VEGF-TGFbRecd-PD1ecd | heavy chain = SEQ ID NO: 370 |
| (bevacizumab) | light chain = SEQ ID NO: 362 |
| anti-VEGF-TGFbRecd-SIGLEC10ecd | heavy chain = SEQ ID NO: 370 |
| (bevacizumab) | light chain = SEQ ID NO: 363 |
| anti-VEGF-TGFbRecd-SIRPaecd | heavy chain = SEQ ID NO: 370 |
| (bevacizumab) | light chain = SEQ ID NO: 364 |
| anti-VEGF-TGFbRecd-TIM3ecd | heavy chain = SEQ ID NO: 370 |
| (bevacizumab) | light chain = SEQ ID NO: 365 |
| anti-VEGF-TGFbRecd | heavy chain = SEQ ID NO: 370 |
| (bevacizumab) | light chain = SEQ ID NO: 32 |
| anti-VEGF-TIM3ecd-BTLAecd | heavy chain = SEQ ID NO: 371 |
| (bevacizumab) | light chain = SEQ ID NO: 367 |
| anti-VEGF-TIM3ecd-PD1ecd | heavy chain = SEQ ID NO: 371 |
| (bevacizumab) | light chain = SEQ ID NO: 362 |
| anti-VEGF-TIM3ecd-SIGLEC10ecd | heavy chain = SEQ ID NO: 371 |
| (bevacizumab) | light chain = SEQ ID NO: 363 |
| anti-VEGF-TIM3ecd-SIRPaecd | heavy chain = SEQ ID NO: 371 |
| (bevacizumab) | light chain = SEQ ID NO: 364 |
| anti-VEGF-TIM3ecd | heavy chain = SEQ ID NO: 371 |
| (bevacizumab) | light chain = SEQ ID NO: 32 |
| anti-VEGFR-BTLAecd-PD1ecd | heavy chain = SEQ ID NO: 372 |
| (ramucirumab) | light chain = SEQ ID NO: 373 |
| anti-VEGFR-BTLAecd-SIGLEC10ecd | heavy chain = SEQ ID NO: 372 |
| (ramucirumab) | light chain = SEQ ID NO: 374 |
| anti-VEGFR-BTLAecd-SIRPaecd | heavy chain = SEQ ID NO: 372 |
| (ramucirumab) | light chain = SEQ ID NO: 375 |
| anti-VEGFR-BTLAecd-TIM3ecd | heavy chain = SEQ ID NO: 372 |
| (ramucirumab) | light chain = SEQ ID NO: 376 |
| anti-VEGFR-BTLAecd | heavy chain = SEQ ID NO: 372 |
| (ramucirumab) | light chain = SEQ ID NO: 148 |
| anti-VEGFR-PD1ecd-BTLAecd | heavy chain = SEQ ID NO: 377 |
| (ramucirumab) | light chain = SEQ ID NO: 378 |
| anti-VEGFR-PD1ecd-SIGLEC10ecd | heavy chain = SEQ ID NO: 377 |
| (ramucirumab) | light chain = SEQ ID NO: 374 |
| anti-VEGFR-PD1ecd-SIRPaecd | heavy chain = SEQ ID NO: 377 |
| (ramucirumab) | light chain = SEQ ID NO: 375 |
| anti-VEGFR-PD1ecd-TIM3ecd | heavy chain = SEQ ID NO: 377 |
| (ramucirumab) | light chain = SEQ ID NO: 376 |
| anti-VEGFR-PD1ecd | heavy chain = SEQ ID NO: 377 |
| (ramucirumab) | light chain = SEQ ID NO: 148 |
| anti-VEGFR-SIGLEC10ecd-BTLAecd | heavy chain = SEQ ID NO: 379 |
| (ramucirumab) | light chain = SEQ ID NO: 378 |
| anti-VEGFR-SIGLEC10ecd-PD1ecd | heavy chain = SEQ ID NO: 379 |
| (ramucirumab) | light chain = SEQ ID NO: 373 |
| anti-VEGFR-SIGLEC10ecd-SIRPaecd | heavy chain = SEQ ID NO: 379 |
| (ramucirumab) | light chain = SEQ ID NO: 375 |
| anti-VEGFR-SIGLEC10ecd-TIM3ecd | heavy chain = SEQ ID NO: 379 |
| (ramucirumab) | light chain = SEQ ID NO: 376 |
| anti-VEGFR-SIGLEC10ecd | heavy chain = SEQ ID NO: 379 |
| (ramucirumab) | light chain = SEQ ID NO: 148 |
| anti-VEGFR-SIRPaecd-BTLAecd | heavy chain = SEQ ID NO: 380 |
| (ramucirumab) | light chain = SEQ ID NO: 378 |
| anti-VEGFR-SIRPaecd-PD1ecd | heavy chain = SEQ ID NO: 380 |
| (ramucirumab) | light chain = SEQ ID NO: 373 |
| anti-VEGFR-SIRPaecd-SIGLEC10ecd | heavy chain = SEQ ID NO: 380 |
| (ramucirumab) | light chain = SEQ ID NO: 374 |
| anti-VEGFR-SIRPaecd-TIM3ecd | heavy chain = SEQ ID NO: 380 |
| (ramucirumab) | light chain = SEQ ID NO: 376 |
| anti-VEGFR-SIRPaecd | heavy chain = SEQ ID NO: 380 |
| (ramucirumab) | light chain = SEQ ID NO: 148 |
| anti-VEGFR-TGFbRecd-BTLAecd | heavy chain = SEQ ID NO: 381 |
| (ramucirumab) | light chain = SEQ ID NO: 378 |
| anti-VEGFR-TGFbRecd-PD1ecd | heavy chain = SEQ ID NO: 381 |
| (ramucirumab) | light chain = SEQ ID NO: 373 |
| anti-VEGFR-TGFbRecd-SIGLEC10ecd | heavy chain = SEQ ID NO: 381 |
| (ramucirumab) | light chain = SEQ ID NO: 374 |
| anti-VEGFR-TGFbRecd-SIRPaecd | heavy chain = SEQ ID NO: 381 |
| (ramucirumab) | light chain = SEQ ID NO: 375 |
| anti-VEGFR-TGFbRecd-TIM3ecd | heavy chain = SEQ ID NO: 381 |
| (ramucirumab) | light chain = SEQ ID NO: 376 |
| anti-VEGFR-TGFbRecd | heavy chain = SEQ ID NO: 381 |
| (ramucirumab) | light chain = SEQ ID NO: 148 |
| anti-VEGFR-TIM3ecd-BTLAecd | heavy chain = SEQ ID NO: 382 |
| (ramucirumab) | light chain = SEQ ID NO: 378 |
| anti-VEGFR-TIM3ecd-PD1ecd | heavy chain = SEQ ID NO: 382 |
| (ramucirumab) | light chain = SEQ ID NO: 373 |
| anti-VEGFR-TIM3ecd-SIGLEC10ecd | heavy chain = SEQ ID NO: 382 |
| (ramucirumab) | light chain = SEQ ID NO: 374 |
| anti-VEGFR-TIM3ecd-SIRPaecd | heavy chain = SEQ ID NO: 382 |
| (ramucirumab) | light chain = SEQ ID NO: 375 |
| anti-VEGFR-TIM3ecd | heavy chain = SEQ ID NO: 382 |
| (ramucirumab) | light chain = SEQ ID NO: 148 |
| anti-CD47-BTLAecd-PD1ecd | heavy chain = SEQ ID NO: 383 |
| (5F9) | light chain = SEQ ID NO: 384 |
| anti-CD47-BTLAecd-SIGLEC10ecd | heavy chain = SEQ ID NO: 383 |
| (5F9) | light chain = SEQ ID NO: 385 |
| anti-CD47-BTLAecd-TIM3ecd | heavy chain = SEQ ID NO: 383 |
| (5F9) | light chain = SEQ ID NO: 386 |
| anti-CD47-BTLAecd | heavy chain = SEQ ID NO: 383 |
| (5F9) | light chain = SEQ ID NO: 22 |
| anti-CD47-PD1ecd-BTLAecd | heavy chain = SEQ ID NO: 387 |
| (5F9) | light chain = SEQ ID NO: 388 |
| anti-CD47-PD1ecd-SIGLEC10ecd | heavy chain = SEQ ID NO: 387 |
| (5F9) | light chain = SEQ ID NO: 385 |
| anti-CD47-PD1ecd-TIM3ecd | heavy chain = SEQ ID NO: 387 |
| (5F9) | light chain = SEQ ID NO: 386 |
| anti-CD47-PD1ecd | heavy chain = SEQ ID NO: 387 |
| (5F9) | light chain = SEQ ID NO: 22 |
| anti-CD47-SIGLEC10ecd-BTLAecd | heavy chain = SEQ ID NO: 389 |
| (5F9) | light chain = SEQ ID NO: 388 |
| anti-CD47-SIGLEC10ecd-PD1ecd | heavy chain = SEQ ID NO: 389 |
| (5F9) | light chain = SEQ ID NO: 384 |
| anti-CD47-SIGLEC10ecd-TIM3ecd | heavy chain = SEQ ID NO: 389 |
| (5F9) | light chain = SEQ ID NO: 386 |
| anti-CD47-SIGLEC10ecd | heavy chain = SEQ ID NO: 389 |
| (5F9) | light chain = SEQ ID NO: 22 |
| anti-CD47-TGFbRecd-BTLAecd | heavy chain = SEQ ID NO: 390 |
| (5F9) | light chain = SEQ ID NO: 388 |
| anti-CD47-TGFbRecd-PD1ecd | heavy chain = SEQ ID NO: 390 |
| (5F9) | light chain = SEQ ID NO: 384 |
| anti-CD47-TGFbRecd-SIGLEC10ecd | heavy chain = SEQ ID NO: 390 |
| (5F9) | light chain = SEQ ID NO: 385 |
| anti-CD47-TGFbRecd-TIM3ecd | heavy chain = SEQ ID NO: 390 |
| (5F9) | light chain = SEQ ID NO: 386 |
| anti-CD47-TGFbRecd | heavy chain = SEQ ID NO: 390 |
| (5F9) | light chain = SEQ ID NO: 22 |
| anti-CD47-TIM3ecd-BTLAecd | heavy chain = SEQ ID NO: 391 |
| (5F9) | light chain = SEQ ID NO: 388 |
| anti-CD47-TIM3ecd-PD1ecd | heavy chain = SEQ ID NO: 391 |
| (5F9) | light chain = SEQ ID NO: 384 |
| anti-CD47-TIM3ecd-SIGLEC10ecd | heavy chain = SEQ ID NO: 391 |
| (5F9) | light chain = SEQ ID NO: 385 |
| anti-CD47-TIM3ecd | heavy chain = SEQ ID NO: 391 |
| (5F9) | light chain = SEQ ID NO: 22 |
| anti-CD47-VEGFRecd-BTLAecd | heavy chain = SEQ ID NO: 392 |
| (5F9) | light chain = SEQ ID NO: 388 |
| anti-CD47-VEGFRecd-PD1ecd | heavy chain = SEQ ID NO: 392 |
| (5F9) | light chain = SEQ ID NO: 384 |
| anti-CD47-VEGFRecd-SIGLEC10ecd | heavy chain = SEQ ID NO: 392 |
| (5F9) | light chain = SEQ ID NO: 385 |
| anti-CD47-VEGFRecd-TIM3ecd | heavy chain = SEQ ID NO: 392 |
| (5F9) | light chain = SEQ ID NO: 386 |
| anti-CD47-VEGFRecd | heavy chain = SEQ ID NO: 392 |
| (5F9) | light chain = SEQ ID NO: 22 |
| anti-TGFb-BTLAecd-PD1ecd | heavy chain = SEQ ID NO: 393 |
| (fresolimumab) | light chain = SEQ ID NO: 394 |
| anti-TGFb-BTLAecd-SIGLEC10ecd | heavy chain = SEQ ID NO: 393 |
| (fresolimumab) | light chain = SEQ ID NO: 395 |
| anti-TGFb-BTLAecd-SIRPaecd | heavy chain = SEQ ID NO: 393 |
| (fresolimumab) | light chain = SEQ ID NO: 396 |
| anti-TGFb-BTLAecd-TIM3ecd | heavy chain = SEQ ID NO: 393 |
| (fresolimumab) | light chain = SEQ ID NO: 397 |
| anti-TGFb-BTLAecd | heavy chain = SEQ ID NO: 393 |
| (fresolimumab) | light chain = SEQ ID NO: 133 |
| anti-TGFb-PD1ecd-BTLAecd | heavy chain = SEQ ID NO: 398 |
| (fresolimumab) | light chain = SEQ ID NO: 399 |
| anti-TGFb-PD1ecd-SIGLEC10ecd | heavy chain = SEQ ID NO: 398 |
| (fresolimumab) | light chain = SEQ ID NO: 395 |
| anti-TGFb-PD1ecd-SIRPaecd | heavy chain = SEQ ID NO: 398 |
| (fresolimumab) | light chain = SEQ ID NO: 396 |
| anti-TGFb-PD1ecd-TIM3ecd | heavy chain = SEQ ID NO: 398 |
| (fresolimumab) | light chain = SEQ ID NO: 397 |
| anti-TGFb-PD1ecd | heavy chain = SEQ ID NO: 398 |
| (fresolimumab) | light chain = SEQ ID NO: 133 |
| anti-TGFb-SIGLEC10ecd-BTLAecd | heavy chain = SEQ ID NO: 400 |
| (fresolimumab) | light chain = SEQ ID NO: 399 |
| anti-TGFb-SIGLEC10ecd-PD1ecd | heavy chain = SEQ ID NO: 400 |
| (fresolimumab) | light chain = SEQ ID NO: 394 |
| anti-TGFb-SIGLEC10ecd-SIRPaecd | heavy chain = SEQ ID NO: 400 |
| (fresolimumab) | light chain = SEQ ID NO: 396 |
| anti-TGFb-SIGLEC10ecd-TIM3ecd | heavy chain = SEQ ID NO: 400 |
| (fresolimumab) | light chain = SEQ ID NO: 397 |
| anti-TGFb-SIGLEC10ecd | heavy chain = SEQ ID NO: 400 |
| (fresolimumab) | light chain = SEQ ID NO: 133 |
| anti-TGFb-SIRPaecd-BTLAecd | heavy chain = SEQ ID NO: 401 |
| (fresolimumab) | light chain = SEQ ID NO: 399 |
| anti-TGFb-SIRPaecd-PD1ecd | heavy chain = SEQ ID NO: 401 |
| (fresolimumab) | light chain = SEQ ID NO: 394 |
| anti-TGFb-SIRPaecd-SIGLEC10ecd | heavy chain = SEQ ID NO: 401 |
| (fresolimumab) | light chain = SEQ ID NO: 395 |
| anti-TGFb-SIRPaecd-TIM3ecd | heavy chain = SEQ ID NO: 401 |
| (fresolimumab) | light chain = SEQ ID NO: 397 |
| anti-TGFb-SIRPaecd | heavy chain = SEQ ID NO: 401 |
| (fresolimumab) | light chain = SEQ ID NO: 133 |
| anti-TGFb-TIM3ecd-BTLAecd | heavy chain = SEQ ID NO: 402 |
| (fresolimumab) | light chain = SEQ ID NO: 399 |
| anti-TGFb-TIM3ecd-PD1ecd | heavy chain = SEQ ID NO: 402 |
| (fresolimumab) | light chain = SEQ ID NO: 394 |
| anti-TGFb-TIM3ecd-SIGLEC10ecd | heavy chain = SEQ ID NO: 402 |
| (fresolimumab) | light chain = SEQ ID NO: 395 |
| anti-TGFb-TIM3ecd-SIRPaecd | heavy chain = SEQ ID NO: 402 |
| (fresolimumab) | light chain = SEQ ID NO: 396 |
| anti-TGFb-TIM3ecd | heavy chain = SEQ ID NO: 402 |
| (fresolimumab) | light chain = SEQ ID NO: 133 |
| anti-TGFb-VEGFRecd-BTLAecd | heavy chain = SEQ ID NO: 403 |
| (fresolimumab) | light chain = SEQ ID NO: 399 |
| anti-TGFb-VEGFRecd-PD1ecd | heavy chain = SEQ ID NO: 403 |
| (fresolimumab) | light chain = SEQ ID NO: 394 |
| anti-TGFb-VEGFRecd-SIGLEC10ecd | heavy chain = SEQ ID NO: 403 |
| (fresolimumab) | light chain = SEQ ID NO: 395 |
| anti-TGFb-VEGFRecd-SIRPaecd | heavy chain = SEQ ID NO: 403 |
| (fresolimumab) | light chain = SEQ ID NO: 396 |
| anti-TGFb-VEGFRecd-TIM3ecd | heavy chain = SEQ ID NO: 403 |
| (fresolimumab) | light chain = SEQ ID NO: 397 |
| anti-TGFb-VEGFRecd | heavy chain = SEQ ID NO: 403 |
| (fresolimumab) | light chain = SEQ ID NO: 133 |
| anti-LAP-BTLAecd | heavy chain = SEQ ID NO: 404 |
| (7H4) | light chain = SEQ ID NO: 81 |
| anti-LAP-PD1ecd | heavy chain = SEQ ID NO: 405 |
| (7H4) | light chain = SEQ ID NO: 81 |
| anti-LAP-SIGLEC10ecd | heavy chain = SEQ ID NO: 406 |
| (7H4) | light chain = SEQ ID NO: 81 |
| anti-LAP-SIRPaecd | heavy chain = SEQ ID NO: 407 |
| (7H4) | light chain = SEQ ID NO: 81 |
| anti-LAP-TIM3ecd | heavy chain = SEQ ID NO: 408 |
| (7H4) | light chain = SEQ ID NO: 81 |
| anti-LAP-VEGFRecd | heavy chain = SEQ ID NO: 409 |
| (7H4) | light chain = SEQ ID NO: 81 |
| anti-GARP-BTLAecd | heavy chain = SEQ ID NO: 410 |
| (ARGX-115) | light chain = SEQ ID NO: 49 |
| anti-GARP-PD1ecd | heavy chain = SEQ ID NO: 411 |
| (ARGX-115) | light chain = SEQ ID NO: 49 |
| anti-GARP-SIGLEC10ecd | heavy chain = SEQ ID NO: 412 |
| (ARGX-115) | light chain = SEQ ID NO: 49 |
| anti-GARP-SIRPaecd | heavy chain = SEQ ID NO: 413 |
| (ARGX-115) | light chain = SEQ ID NO: 49 |
| anti-GARP-TIM3ecd | heavy chain = SEQ ID NO: 414 |
| (ARGX-115) | light chain = SEQ ID NO: 49 |
| anti-GARP-VEGFRecd | heavy chain = SEQ ID NO: 415 |
| (ARGX-115) | light chain = SEQ ID NO: 49 |
| anti-CD73-BTLAecd-PD1ecd | heavy chain = SEQ ID NO: 416 |
| (GS1423) | light chain = SEQ ID NO: 417 |
| anti-CD73-BTLAecd-SIGLEC10ecd | heavy chain = SEQ ID NO: 416 |
| (GS1423) | light chain = SEQ ID NO: 418 |
| anti-CD73-BTLAecd-SIRPaecd | heavy chain = SEQ ID NO: 416 |
| (GS1423) | light chain = SEQ ID NO: 419 |
| anti-CD73-BTLAecd-TIM3ecd | heavy chain = SEQ ID NO: 416 |
| (GS1423) | light chain = SEQ ID NO: 420 |
| anti-CD73-BTLAecd | heavy chain = SEQ ID NO: 416 |
| (GS1423) | light chain = SEQ ID NO: 24 |
| anti-CD73-PD1ecd-BTLAecd | heavy chain = SEQ ID NO: 421 |
| (GS1423) | light chain = SEQ ID NO: 422 |
| anti-CD73-PD1ecd-SIGLEC10ecd | heavy chain = SEQ ID NO: 421 |
| (GS1423) | light chain = SEQ ID NO: 418 |
| anti-CD73-PD1ecd-SIRPaecd | heavy chain = SEQ ID NO: 421 |
| (GS1423) | light chain = SEQ ID NO: 419 |
| anti-CD73-PD1ecd-TIM3ecd | heavy chain = SEQ ID NO: 421 |
| (GS1423) | light chain = SEQ ID NO: 420 |
| anti-CD73-PD1ecd | heavy chain = SEQ ID NO: 421 |
| (GS1423) | light chain = SEQ ID NO: 24 |
| anti-CD73-SIGLEC10ecd-BTLAecd | heavy chain = SEQ ID NO: 423 |
| (GS1423) | light chain = SEQ ID NO: 422 |
| anti-CD73-SIGLEC10ecd-PD1ecd | heavy chain = SEQ ID NO: 423 |
| (GS1423) | light chain = SEQ ID NO: 417 |
| anti-CD73-SIGLEC10ecd-SIRPaecd | heavy chain = SEQ ID NO: 423 |
| (GS1423) | light chain = SEQ ID NO: 419 |
| anti-CD73-SIGLEC10ecd-TIM3ecd | heavy chain = SEQ ID NO: 423 |
| (GS1423) | light chain = SEQ ID NO: 420 |
| anti-CD73-SIGLEC10ecd | heavy chain = SEQ ID NO: 423 |
| (GS1423) | light chain = SEQ ID NO: 24 |
| anti-CD73-SIRPaecd-BTLAecd | heavy chain = SEQ ID NO: 424 |
| (GS1423) | light chain = SEQ ID NO: 422 |
| anti-CD73-SIRPaecd-PD1ecd | heavy chain = SEQ ID NO: 424 |
| (GS1423) | light chain = SEQ ID NO: 417 |
| anti-CD73-SIRPaecd-SIGLEC10ecd | heavy chain = SEQ ID NO: 424 |
| (GS1423) | light chain = SEQ ID NO: 418 |
| anti-CD73-SIRPaecd-TIM3ecd | heavy chain = SEQ ID NO: 424 |
| (GS1423) | light chain = SEQ ID NO: 420 |
| anti-CD73-SIRPaecd | heavy chain = SEQ ID NO: 424 |
| (GS1423) | light chain = SEQ ID NO: 24 |
| anti-CD73-TGFbRecd-BTLAecd | heavy chain = SEQ ID NO: 425 |
| (GS1423) | light chain = SEQ ID NO: 422 |
| anti-CD73-TGFbRecd-PD1ecd | heavy chain = SEQ ID NO: 425 |
| (GS1423) | light chain = SEQ ID NO: 417 |
| anti-CD73-TGFbRecd-SIGLEC10ecd | heavy chain = SEQ ID NO: 425 |
| (GS1423) | light chain = SEQ ID NO: 418 |
| anti-CD73-TGFbRecd-SIRPaecd | heavy chain = SEQ ID NO: 425 |
| (GS1423) | light chain = SEQ ID NO: 419 |
| anti-CD73-TGFbRecd-TIM3ecd | heavy chain = SEQ ID NO: 425 |
| (GS1423) | light chain = SEQ ID NO: 420 |
| anti-CD73-TGFbRecd | heavy chain = SEQ ID NO: 425 |
| (GS1423) | light chain = SEQ ID NO: 24 |
| anti-CD73-TIM3ecd-BTLAecd | heavy chain = SEQ ID NO: 426 |
| (GS1423) | light chain = SEQ ID NO: 422 |
| anti-CD73-TIM3ecd-PD1ecd | heavy chain = SEQ ID NO: 426 |
| (GS1423) | light chain = SEQ ID NO: 417 |
| anti-CD73-TIM3ecd-SIGLEC10ecd | heavy chain = SEQ ID NO: 426 |
| (GS1423) | light chain = SEQ ID NO: 418 |
| anti-CD73-TIM3ecd-SIRPaecd | heavy chain = SEQ ID NO: 426 |
| (GS1423) | light chain = SEQ ID NO: 419 |
| anti-CD73-TIM3ecd | heavy chain = SEQ ID NO: 426 |
| (GS1423) | light chain = SEQ ID NO: 24 |
| anti-CD73-VEGFRecd-BTLAecd | heavy chain = SEQ ID NO: 427 |
| (GS1423) | light chain = SEQ ID NO: 422 |
| anti-CD73-VEGFRecd-PD1ecd | heavy chain = SEQ ID NO: 427 |
| (GS1423) | light chain = SEQ ID NO: 417 |
| anti-CD73-VEGFRecd-SIGLEC10ecd | heavy chain = SEQ ID NO: 427 |
| (GS1423) | light chain = SEQ ID NO: 418 |
| anti-CD73-VEGFRecd-SIRPaecd | heavy chain = SEQ ID NO: 427 |
| (GS1423) | light chain = SEQ ID NO: 419 |
| anti-CD73-VEGFRecd-TIM3ecd | heavy chain = SEQ ID NO: 427 |
| (GS1423) | light chain = SEQ ID NO: 420 |
| anti-CD73-VEGFRecd | heavy chain = SEQ ID NO: 427 |
| (GS1423) | light chain = SEQ ID NO: 24 |
| anti-CD39-BTLAecd | heavy chain = SEQ ID NO: 428 |
| (IPH5201) | light chain = SEQ ID NO: 18 |
| anti-CD39-PD1ecd | heavy chain = SEQ ID NO: 429 |
| (IPH5201) | light chain = SEQ ID NO: 18 |
| anti-CD39-SIGLEC10ecd | heavy chain = SEQ ID NO: 430 |
| (IPH5201) | light chain = SEQ ID NO: 18 |
| anti-CD39-SIRPaecd | heavy chain = SEQ ID NO: 431 |
| (IPH5201) | light chain = SEQ ID NO: 18 |
| anti-CD39-TGFbRecd | heavy chain = SEQ ID NO: 432 |
| (IPH5201) | light chain = SEQ ID NO: 18 |
| anti-CD39-TIM3ecd | heavy chain = SEQ ID NO: 433 |
| (IPH5201) | light chain = SEQ ID NO: 18 |
| anti-CD39-VEGFRecd | heavy chain = SEQ ID NO: 434 |
| (IPH5201) | light chain = SEQ ID NO: 18 |
| anti-CTLA4-BTLAecd-PD1ecd | heavy chain = SEQ ID NO: 435 |
| (ipilimumab) | light chain = SEQ ID NO: 436 |
| anti-CTLA4-BTLAecd-SIGLEC10ecd | heavy chain = SEQ ID NO: 435 |
| (ipilimumab) | light chain = SEQ ID NO: 437 |
| anti-CTLA4-BTLAecd-SIRPaecd | heavy chain = SEQ ID NO: 435 |
| (ipilimumab) | light chain = SEQ ID NO: 438 |
| anti-CTLA4-BTLAecd-TIM3ecd | heavy chain = SEQ ID NO: 435 |
| (ipilimumab) | light chain = SEQ ID NO: 439 |
| anti-CTLA4-BTLAecd | heavy chain = SEQ ID NO: 435 |
| (ipilimumab) | light chain = SEQ ID NO: 28 |
| anti-CTLA4-PD1ecd-BTLAecd | heavy chain = SEQ ID NO: 440 |
| (ipilimumab) | light chain = SEQ ID NO: 441 |
| anti-CTLA4-PD1ecd-SIGLEC10ecd | heavy chain = SEQ ID NO: 440 |
| (ipilimumab) | light chain = SEQ ID NO: 437 |
| anti-CTLA4-PD1ecd-SIRPaecd | heavy chain = SEQ ID NO: 440 |
| (ipilimumab) | light chain = SEQ ID NO: 438 |
| anti-CTLA4-PD1ecd-TIM3ecd | heavy chain = SEQ ID NO: 440 |
| (ipilimumab) | light chain = SEQ ID NO: 439 |
| anti-CTLA4-PD1ecd | heavy chain = SEQ ID NO: 440 |
| (ipilimumab) | light chain = SEQ ID NO: 28 |
| anti-CTLA4-SIGLEC10ecd-BTLAecd | heavy chain = SEQ ID NO: 442 |
| (ipilimumab) | light chain = SEQ ID NO: 441 |
| anti-CTLA4-SIGLEC10ecd-PD1ecd | heavy chain = SEQ ID NO: 442 |
| (ipilimumab) | light chain = SEQ ID NO: 436 |
| anti-CTLA4-SIGLEC10ecd-SIRPaecd | heavy chain = SEQ ID NO: 442 |
| (ipilimumab) | light chain = SEQ ID NO: 438 |
| anti-CTLA4-SIGLEC10ecd-TIM3ecd | heavy chain = SEQ ID NO: 442 |
| (ipilimumab) | light chain = SEQ ID NO: 439 |
| anti-CTLA4-SIGLEC10ecd | heavy chain = SEQ ID NO: 442 |
| (ipilimumab) | light chain = SEQ ID NO: 28 |
| anti-CTLA4-SIRPaecd-BTLAecd | heavy chain = SEQ ID NO: 443 |
| (ipilimumab) | light chain = SEQ ID NO: 441 |
| anti-CTLA4-SIRPaecd-PD1ecd | heavy chain = SEQ ID NO: 443 |
| (ipilimumab) | light chain = SEQ ID NO: 436 |
| anti-CTLA4-SIRPaecd-SIGLEC10ecd | heavy chain = SEQ ID NO: 443 |
| (ipilimumab) | light chain = SEQ ID NO: 437 |
| anti-CTLA4-SIRPaecd-TIM3ecd | heavy chain = SEQ ID NO: 443 |
| (ipilimumab) | light chain = SEQ ID NO: 439 |
| anti-CTLA4-SIRPaecd | heavy chain = SEQ ID NO: 443 |
| (ipilimumab) | light chain = SEQ ID NO: 28 |
| anti-CTLA4-TGFbRecd-BTLAecd | heavy chain = SEQ ID NO: 444 |
| (ipilimumab) | light chain = SEQ ID NO: 441 |
| anti-CTLA4-TGFbRecd-PD1ecd | heavy chain = SEQ ID NO: 444 |
| (ipilimumab) | light chain = SEQ ID NO: 436 |
| anti-CTLA4-TGFbRecd-SIGLEC10ecd | heavy chain = SEQ ID NO: 444 |
| (ipilimumab) | light chain = SEQ ID NO: 437 |
| anti-CTLA4-TGFbRecd-SIRPaecd | heavy chain = SEQ ID NO: 444 |
| (ipilimumab) | light chain = SEQ ID NO: 438 |
| anti-CTLA4-TGFbRecd-TIM3ecd | heavy chain = SEQ ID NO: 444 |
| (ipilimumab) | light chain = SEQ ID NO: 439 |
| anti-CTLA4-TGFbRecd | heavy chain = SEQ ID NO: 444 |
| (ipilimumab) | light chain = SEQ ID NO: 28 |
| anti-CTLA4-TIM3ecd-BTLAecd | heavy chain = SEQ ID NO: 445 |
| (ipilimumab) | light chain = SEQ ID NO: 441 |
| anti-CTLA4-TIM3ecd-PD1ecd | heavy chain = SEQ ID NO: 445 |
| (ipilimumab) | light chain = SEQ ID NO: 436 |
| anti-CTLA4-TIM3ecd-SIGLEC10ecd | heavy chain = SEQ ID NO: 445 |
| (ipilimumab) | light chain = SEQ ID NO: 437 |
| anti-CTLA4-TIM3ecd-SIRPaecd | heavy chain = SEQ ID NO: 445 |
| (ipilimumab) | light chain = SEQ ID NO: 438 |
| anti-CTLA4-TIM3ecd | heavy chain = SEQ ID NO: 445 |
| (ipilimumab) | light chain = SEQ ID NO: 28 |
| anti-CTLA4-VEGFRecd-BTLAecd | heavy chain = SEQ ID NO: 446 |
| (ipilimumab) | light chain = SEQ ID NO: 441 |
| anti-CTLA4-VEGFRecd-PD1ecd | heavy chain = SEQ ID NO: 446 |
| (ipilimumab) | light chain = SEQ ID NO: 436 |
| anti-CTLA4-VEGFRecd-SIGLEC10ecd | heavy chain = SEQ ID NO: 446 |
| (ipilimumab) | light chain = SEQ ID NO: 437 |
| anti-CTLA4-VEGFRecd-SIRPaecd | heavy chain = SEQ ID NO: 446 |
| (ipilimumab) | light chain = SEQ ID NO: 438 |
| anti-CTLA4-VEGFRecd-TIM3ecd | heavy chain = SEQ ID NO: 446 |
| (ipilimumab) | light chain = SEQ ID NO: 439 |
| anti-CTLA4-VEGFRecd | heavy chain = SEQ ID NO: 446 |
| (ipilimumab) | light chain = SEQ ID NO: 28 |
| anti-PD1-BTLAecd-PD1ecd | heavy chain = SEQ ID NO: 447 |
| (pembrolizumab) | light chain = SEQ ID NO: 448 |
| anti-PD1-BTLAecd-SIGLEC10ecd | heavy chain = SEQ ID NO: 447 |
| (pembrolizumab) | light chain = SEQ ID NO: 449 |
| anti-PD1-BTLAecd-SIRPaecd | heavy chain = SEQ ID NO: 447 |
| (pembrolizumab) | light chain = SEQ ID NO: 450 |
| anti-PD1-BTLAecd-TIM3ecd | heavy chain = SEQ ID NO: 447 |
| (pembrolizumab) | light chain = SEQ ID NO: 451 |
| anti-PD1-BTLAecd | heavy chain = SEQ ID NO: 447 |
| (pembrolizumab) | light chain = SEQ ID NO: 101 |
| anti-PD1-PD1ecd-BTLAecd | heavy chain = SEQ ID NO: 452 |
| (pembrolizumab) | light chain = SEQ ID NO: 453 |
| anti-PD1-PD1ecd-SIGLEC10ecd | heavy chain = SEQ ID NO: 452 |
| (pembrolizumab) | light chain = SEQ ID NO: 449 |
| anti-PD1-PD1ecd-SIRPaecd | heavy chain = SEQ ID NO: 452 |
| (pembrolizumab) | light chain = SEQ ID NO: 450 |
| anti-PD1-PD1ecd-TIM3ecd | heavy chain = SEQ ID NO: 452 |
| (pembrolizumab) | light chain = SEQ ID NO: 451 |
| anti-PD1-PD1ecd | heavy chain = SEQ ID NO: 452 |
| (pembrolizumab) | light chain = SEQ ID NO: 101 |
| anti-PD1-SIGLEC10ecd-BTLAecd | heavy chain = SEQ ID NO: 454 |
| (pembrolizumab) | light chain = SEQ ID NO: 453 |
| anti-PD1-SIGLEC10ecd-PD1ecd | heavy chain = SEQ ID NO: 454 |
| (pembrolizumab) | light chain = SEQ ID NO: 448 |
| anti-PD1-SIGLEC10ecd-SIRPaecd | heavy chain = SEQ ID NO: 454 |
| (pembrolizumab) | light chain = SEQ ID NO: 450 |
| anti-PD1-SIGLEC10ecd-TIM3ecd | heavy chain = SEQ ID NO: 454 |
| (pembrolizumab) | light chain = SEQ ID NO: 451 |
| anti-PD1-SIGLEC10ecd | heavy chain = SEQ ID NO: 454 |
| (pembrolizumab) | light chain = SEQ ID NO: 101 |
| anti-PD1-SIRPaecd-BTLAecd | heavy chain = SEQ ID NO: 455 |
| (pembrolizumab) | light chain = SEQ ID NO: 453 |
| anti-PD1-SIRPaecd-PD1ecd | heavy chain = SEQ ID NO: 455 |
| (pembrolizumab) | light chain = SEQ ID NO: 448 |
| anti-PD1-SIRPaecd-SIGLEC10ecd | heavy chain = SEQ ID NO: 455 |
| (pembrolizumab) | light chain = SEQ ID NO: 449 |
| anti-PD1-SIRPaecd-TIM3ecd | heavy chain = SEQ ID NO: 455 |
| (pembrolizumab) | light chain = SEQ ID NO: 451 |
| anti-PD1-SIRPaecd | heavy chain = SEQ ID NO: 455 |
| (pembrolizumab) | light chain = SEQ ID NO: 101 |
| anti-PD1-TGFbRecd-BTLAecd | heavy chain = SEQ ID NO: 456 |
| (pembrolizumab) | light chain = SEQ ID NO: 453 |
| anti-PD1-TGFbRecd-PD1ecd | heavy chain = SEQ ID NO: 456 |
| (pembrolizumab) | light chain = SEQ ID NO: 448 |
| anti-PD1-TGFbRecd-SIGLEC10ecd | heavy chain = SEQ ID NO: 456 |
| (pembrolizumab) | light chain = SEQ ID NO: 449 |
| anti-PD1-TGFbRecd-SIRPaecd | heavy chain = SEQ ID NO: 456 |
| (pembrolizumab) | light chain = SEQ ID NO: 450 |
| anti-PD1-TGFbRecd-TIM3ecd | heavy chain = SEQ ID NO: 456 |
| (pembrolizumab) | light chain = SEQ ID NO: 451 |
| anti-PD1-TGFbRecd | heavy chain = SEQ ID NO: 456 |
| (pembrolizumab) | light chain = SEQ ID NO: 101 |
| anti-PD1-TIM3ecd-BTLAecd | heavy chain = SEQ ID NO: 457 |
| (pembrolizumab) | light chain = SEQ ID NO: 453 |
| anti-PD1-TIM3ecd-PD1ecd | heavy chain = SEQ ID NO: 457 |
| (pembrolizumab) | light chain = SEQ ID NO: 448 |
| anti-PD1-TIM3ecd-SIGLEC10ecd | heavy chain = SEQ ID NO: 457 |
| (pembrolizumab) | light chain = SEQ ID NO: 449 |
| anti-PD1-TIM3ecd-SIRPaecd | heavy chain = SEQ ID NO: 457 |
| (pembrolizumab) | light chain = SEQ ID NO: 450 |
| anti-PD1-TIM3ecd | heavy chain = SEQ ID NO: 457 |
| (pembrolizumab) | light chain = SEQ ID NO: 101 |
| anti-PD1-VEGFRecd-BTLAecd | heavy chain = SEQ ID NO: 458 |
| (pembrolizumab) | light chain = SEQ ID NO: 453 |
| anti-PD1-VEGFRecd-PD1ecd | heavy chain = SEQ ID NO: 458 |
| (pembrolizumab) | light chain = SEQ ID NO: 448 |
| anti-PD1-VEGFRecd-SIGLEC10ecd | heavy chain = SEQ ID NO: 458 |
| (pembrolizumab) | light chain = SEQ ID NO: 449 |
| anti-PD1-VEGFRecd-SIRPaecd | heavy chain = SEQ ID NO: 458 |
| (pembrolizumab) | light chain = SEQ ID NO: 450 |
| anti-PD1-VEGFRecd-TIM3ecd | heavy chain = SEQ ID NO: 458 |
| (pembrolizumab) | light chain = SEQ ID NO: 451 |
| anti-PD1-VEGFRecd | heavy chain = SEQ ID NO: 458 |
| (pembrolizumab) | light chain = SEQ ID NO: 101 |
| anti-PDL1-BTLAecd-SIGLEC10ecd | heavy chain = SEQ ID NO: 459 |
| (atezolizumab) | light chain = SEQ ID NO: 460 |
| anti-PDL1-BTLAecd-SIRPaecd | heavy chain = SEQ ID NO: 459 |
| (atezolizumab) | light chain = SEQ ID NO: 461 |
| anti-PDL1-BTLAecd-TIM3ecd | heavy chain = SEQ ID NO: 459 |
| (atezolizumab) | light chain = SEQ ID NO: 462 |
| anti-PDL1-BTLAecd | heavy chain = SEQ ID NO: 459 |
| (atezolizumab) | light chain = SEQ ID NO: 109 |
| anti-PDL1-SIGLEC10ecd-BTLAecd | heavy chain = SEQ ID NO: 463 |
| (atezolizumab) | light chain = SEQ ID NO: 464 |
| anti-PDL1-SIGLEC10ecd-SIRPaecd | heavy chain = SEQ ID NO: 463 |
| (atezolizumab) | light chain = SEQ ID NO: 461 |
| anti-PDL1-SIGLEC10ecd-TIM3ecd | heavy chain = SEQ ID NO: 463 |
| (atezolizumab) | light chain = SEQ ID NO: 462 |
| anti-PDL1-SIGLEC10ecd | heavy chain = SEQ ID NO: 463 |
| (atezolizumab) | light chain = SEQ ID NO: 109 |
| anti-PDL1-SIRPaecd-BTLAecd | heavy chain = SEQ ID NO: 465 |
| (atezolizumab) | light chain = SEQ ID NO: 464 |
| anti-PDL1-SIRPaecd-SIGLEC10ecd | heavy chain = SEQ ID NO: 465 |
| (atezolizumab) | light chain = SEQ ID NO: 460 |
| anti-PDL1-SIRPaecd-TIM3ecd | heavy chain = SEQ ID NO: 465 |
| (atezolizumab) | light chain = SEQ ID NO: 462 |
| anti-PDL1-SIRPaecd | heavy chain = SEQ ID NO: 465 |
| (atezolizumab) | light chain = SEQ ID NO: 109 |
| anti-PDL1-TGFbRecd-BTLAecd | heavy chain = SEQ ID NO: 466 |
| (atezolizumab) | light chain = SEQ ID NO: 464 |
| anti-PDL1-TGFbRecd-SIGLEC10ecd | heavy chain = SEQ ID NO: 466 |
| (atezolizumab) | light chain = SEQ ID NO: 460 |
| anti-PDL1-TGFbRecd-SIRPaecd | heavy chain = SEQ ID NO: 466 |
| (atezolizumab) | light chain = SEQ ID NO: 461 |
| anti-PDL1-TGFbRecd-TIM3ecd | heavy chain = SEQ ID NO: 466 |
| (atezolizumab) | light chain = SEQ ID NO: 462 |
| anti-PDL1-TGFbRecd | heavy chain = SEQ ID NO: 466 |
| (atezolizumab) | light chain = SEQ ID NO: 109 |
| anti-PDL1-TIM3ecd-BTLAecd | heavy chain = SEQ ID NO: 467 |
| (atezolizumab) | light chain = SEQ ID NO: 464 |
| anti-PDL1-TIM3ecd-SIGLEC10ecd | heavy chain = SEQ ID NO: 467 |
| (atezolizumab) | light chain = SEQ ID NO: 460 |
| anti-PDL1-TIM3ecd-SIRPaecd | heavy chain = SEQ ID NO: 467 |
| (atezolizumab) | light chain = SEQ ID NO: 461 |
| anti-PDL1-TIM3ecd | heavy chain = SEQ ID NO: 467 |
| (atezolizumab) | light chain = SEQ ID NO: 109 |
| anti-PDL1-VEGFRecd-BTLAecd | heavy chain = SEQ ID NO: 468 |
| (atezolizumab) | light chain = SEQ ID NO: 464 |
| anti-PDL1-VEGFRecd-SIGLEC10ecd | heavy chain = SEQ ID NO: 468 |
| (atezolizumab) | light chain = SEQ ID NO: 460 |
| anti-PDL1-VEGFRecd-SIRPaecd | heavy chain = SEQ ID NO: 468 |
| (atezolizumab) | light chain = SEQ ID NO: 461 |
| anti-PDL1-VEGFRecd-TIM3ecd | heavy chain = SEQ ID NO: 468 |
| (atezolizumab) | light chain = SEQ ID NO: 462 |
| anti-PDL1-VEGFRecd | heavy chain = SEQ ID NO: 468 |
| (atezolizumab) | light chain = SEQ ID NO: 109 |
| anti-TIGIT-BTLAecd-PD1ecd | heavy chain = SEQ ID NO: 469 |
| (tiragolumab) | light chain = SEQ ID NO: 470 |
| anti-TIGIT-BTLAecd-SIGLEC10ecd | heavy chain = SEQ ID NO: 469 |
| (tiragolumab) | light chain = SEQ ID NO: 471 |
| anti-TIGIT-BTLAecd-SIRPaecd | heavy chain = SEQ ID NO: 469 |
| (tiragolumab) | light chain = SEQ ID NO: 472 |
| anti-TIGIT-BTLAecd-TIM3ecd | heavy chain = SEQ ID NO: 469 |
| (tiragolumab) | light chain = SEQ ID NO: 473 |
| anti-TIGIT-BTLAecd | heavy chain = SEQ ID NO: 469 |
| (tiragolumab) | light chain = SEQ ID NO: 139 |
| anti-TIGIT-PD1ecd-BTLAecd | heavy chain = SEQ ID NO: 474 |
| (tiragolumab) | light chain = SEQ ID NO: 475 |
| anti-TIGIT-PD1ecd-SIGLEC10ecd | heavy chain = SEQ ID NO: 474 |
| (tiragolumab) | light chain = SEQ ID NO: 471 |
| anti-TIGIT-PD1ecd-SIRPaecd | heavy chain = SEQ ID NO: 474 |
| (tiragolumab) | light chain = SEQ ID NO: 472 |
| anti-TIGIT-PD1ecd-TIM3ecd | heavy chain = SEQ ID NO: 474 |
| (tiragolumab) | light chain = SEQ ID NO: 473 |
| anti-TIGIT-PD1ecd | heavy chain = SEQ ID NO: 474 |
| (tiragolumab) | light chain = SEQ ID NO: 139 |
| anti-TIGIT-SIGLEC10ecd-BTLAecd | heavy chain = SEQ ID NO: 476 |
| (tiragolumab) | light chain = SEQ ID NO: 475 |
| anti-TIGIT-SIGLEC10ecd-PD1ecd | heavy chain = SEQ ID NO: 476 |
| (tiragolumab) | light chain = SEQ ID NO: 470 |
| anti-TIGIT-SIGLEC10ecd-SIRPaecd | heavy chain = SEQ ID NO: 476 |
| (tiragolumab) | light chain = SEQ ID NO: 472 |
| anti-TIGIT-SIGLEC10ecd-TIM3ecd | heavy chain = SEQ ID NO: 476 |
| (tiragolumab) | light chain = SEQ ID NO: 473 |
| anti-TIGIT-SIGLEC10ecd | heavy chain = SEQ ID NO: 476 |
| (tiragolumab) | light chain = SEQ ID NO: 139 |
| anti-TIGIT-SIRPaecd-BTLAecd | heavy chain = SEQ ID NO: 477 |
| (tiragolumab) | light chain = SEQ ID NO: 475 |
| anti-TIGIT-SIRPaecd-PD1ecd | heavy chain = SEQ ID NO: 477 |
| (tiragolumab) | light chain = SEQ ID NO: 470 |
| anti-TIGIT-SIRPaecd-SIGLEC10ecd | heavy chain = SEQ ID NO: 477 |
| (tiragolumab) | light chain = SEQ ID NO: 471 |
| anti-TIGIT-SIRPaecd-TIM3ecd | heavy chain = SEQ ID NO: 477 |
| (tiragolumab) | light chain = SEQ ID NO: 473 |
| anti-TIGIT-SIRPaecd | heavy chain = SEQ ID NO: 477 |
| (tiragolumab) | light chain = SEQ ID NO: 139 |
| anti-TIGIT-TGFbRecd-BTLAecd | heavy chain = SEQ ID NO: 478 |
| (tiragolumab) | light chain = SEQ ID NO: 475 |
| anti-TIGIT-TGFbRecd-PD1ecd | heavy chain = SEQ ID NO: 478 |
| (tiragolumab) | light chain = SEQ ID NO: 470 |
| anti-TIGIT-TGFbRecd-SIGLEC10ecd | heavy chain = SEQ ID NO: 478 |
| (tiragolumab) | light chain = SEQ ID NO: 471 |
| anti-TIGIT-TGFbRecd-SIRPaecd | heavy chain = SEQ ID NO: 478 |
| (tiragolumab) | light chain = SEQ ID NO: 472 |
| anti-TIGIT-TGFbRecd-TIM3ecd | heavy chain = SEQ ID NO: 478 |
| (tiragolumab) | light chain = SEQ ID NO: 473 |
| anti-TIGIT-TGFbRecd | heavy chain = SEQ ID NO: 478 |
| (tiragolumab) | light chain = SEQ ID NO: 139 |
| anti-TIGIT-TIM3ecd-BTLAecd | heavy chain = SEQ ID NO: 479 |
| (tiragolumab) | light chain = SEQ ID NO: 475 |
| anti-TIGIT-TIM3ecd-PD1ecd | heavy chain = SEQ ID NO: 479 |
| (tiragolumab) | light chain = SEQ ID NO: 470 |
| anti-TIGIT-TIM3ecd-SIGLEC10ecd | heavy chain = SEQ ID NO: 479 |
| (tiragolumab) | light chain = SEQ ID NO: 471 |
| anti-TIGIT-TIM3ecd-SIRPaecd | heavy chain = SEQ ID NO: 479 |
| (tiragolumab) | light chain = SEQ ID NO: 472 |
| anti-TIGIT-TIM3ecd | heavy chain = SEQ ID NO: 479 |
| (tiragolumab) | light chain = SEQ ID NO: 139 |
| anti-TIGIT-VEGFRecd-BTLAecd | heavy chain = SEQ ID NO: 480 |
| (tiragolumab) | light chain = SEQ ID NO: 475 |
| anti-TIGIT-VEGFRecd-PD1ecd | heavy chain = SEQ ID NO: 480 |
| (tiragolumab) | light chain = SEQ ID NO: 470 |
| anti-TIGIT-VEGFRecd-SIGLEC10ecd | heavy chain = SEQ ID NO: 480 |
| (tiragolumab) | light chain = SEQ ID NO: 471 |
| anti-TIGIT-VEGFRecd-SIRPaecd | heavy chain = SEQ ID NO: 480 |
| (tiragolumab) | light chain = SEQ ID NO: 472 |
| anti-TIGIT-VEGFRecd-TIM3ecd | heavy chain = SEQ ID NO: 480 |
| (tiragolumab) | light chain = SEQ ID NO: 473 |
| anti-TIGIT-VEGFRecd | heavy chain = SEQ ID NO: 480 |
| (tiragolumab) | light chain = SEQ ID NO: 139 |
| anti-TIM3-BTLAecd-PD1ecd | heavy chain = SEQ ID NO: 481 |
| (M6903) | light chain = SEQ ID NO: 482 |
| anti-TIM3-BTLAecd-SIGLEC10ecd | heavy chain = SEQ ID NO: 481 |
| (M6903) | light chain = SEQ ID NO: 483 |
| anti-TIM3-BTLAecd-SIRPaecd | heavy chain = SEQ ID NO: 481 |
| (M6903) | light chain = SEQ ID NO: 484 |
| anti-TIM3-BTLAecd-TIM3ecd | heavy chain = SEQ ID NO: 481 |
| (M6903) | light chain = SEQ ID NO: 485 |
| anti-TIM3-BTLAecd | heavy chain = SEQ ID NO: 481 |
| (M6903) | light chain = SEQ ID NO: 141 |
| anti-TIM3-PD1ecd-BTLAecd | heavy chain = SEQ ID NO: 486 |
| (M6903) | light chain = SEQ ID NO: 487 |
| anti-TIM3-PD1ecd-SIGLEC10ecd | heavy chain = SEQ ID NO: 486 |
| (M6903) | light chain = SEQ ID NO: 483 |
| anti-TIM3-PD1ecd-SIRPaecd | heavy chain = SEQ ID NO: 486 |
| (M6903) | light chain = SEQ ID NO: 484 |
| anti-TIM3-PD1ecd-TIM3ecd | heavy chain = SEQ ID NO: 486 |
| (M6903) | light chain = SEQ ID NO: 485 |
| anti-TIM3-PD1ecd | heavy chain = SEQ ID NO: 486 |
| (M6903) | light chain = SEQ ID NO: 141 |
| anti-TIM3-SIGLEC10ecd-BTLAecd | heavy chain = SEQ ID NO: 488 |
| (M6903) | light chain = SEQ ID NO: 487 |
| anti-TIM3-SIGLEC10ecd-PD1ecd | heavy chain = SEQ ID NO: 488 |
| (M6903) | light chain = SEQ ID NO: 482 |
| anti-TIM3-SIGLEC10ecd-SIRPaecd | heavy chain = SEQ ID NO: 488 |
| (M6903) | light chain = SEQ ID NO: 484 |
| anti-TIM3-SIGLEC10ecd-TIM3ecd | heavy chain = SEQ ID NO: 488 |
| (M6903) | light chain = SEQ ID NO: 485 |
| anti-TIM3-SIGLEC10ecd | heavy chain = SEQ ID NO: 488 |
| (M6903) | light chain = SEQ ID NO: 141 |
| anti-TIM3-SIRPaecd-BTLAecd | heavy chain = SEQ ID NO: 489 |
| (M6903) | light chain = SEQ ID NO: 487 |
| anti-TIM3-SIRPaecd-PD1ecd | heavy chain = SEQ ID NO: 489 |
| (M6903) | light chain = SEQ ID NO: 482 |
| anti-TIM3-SIRPaecd-SIGLEC10ecd | heavy chain = SEQ ID NO: 489 |
| (M6903) | light chain = SEQ ID NO: 483 |
| anti-TIM3-SIRPaecd-TIM3ecd | heavy chain = SEQ ID NO: 489 |
| (M6903) | light chain = SEQ ID NO: 485 |
| anti-TIM3-SIRPaecd | heavy chain = SEQ ID NO: 489 |
| (M6903) | light chain = SEQ ID NO: 141 |
| anti-TIM3-TGFbRecd-BTLAecd | heavy chain = SEQ ID NO: 490 |
| (M6903) | light chain = SEQ ID NO: 487 |
| anti-TIM3-TGFbRecd-PD1ecd | heavy chain = SEQ ID NO: 490 |
| (M6903) | light chain = SEQ ID NO: 482 |
| anti-TIM3-TGFbRecd-SIGLEC10ecd | heavy chain = SEQ ID NO: 490 |
| (M6903) | light chain = SEQ ID NO: 483 |
| anti-TIM3-TGFbRecd-SIRPaecd | heavy chain = SEQ ID NO: 490 |
| (M6903) | light chain = SEQ ID NO: 484 |
| anti-TIM3-TGFbRecd-TIM3ecd | heavy chain = SEQ ID NO: 490 |
| (M6903) | light chain = SEQ ID NO: 485 |
| anti-TIM3-TGFbRecd | heavy chain = SEQ ID NO: 490 |
| (M6903) | light chain = SEQ ID NO: 141 |
| anti-TIM3-TIM3ecd-BTLAecd | heavy chain = SEQ ID NO: 491 |
| (M6903) | light chain = SEQ ID NO: 487 |
| anti-TIM3-TIM3ecd-PD1ecd | heavy chain = SEQ ID NO: 491 |
| (M6903) | light chain = SEQ ID NO: 482 |
| anti-TIM3-TIM3ecd-SIGLEC10ecd | heavy chain = SEQ ID NO: 491 |
| (M6903) | light chain = SEQ ID NO: 483 |
| anti-TIM3-TIM3ecd-SIRPaecd | heavy chain = SEQ ID NO: 491 |
| (M6903) | light chain = SEQ ID NO: 484 |
| anti-TIM3-TIM3ecd | heavy chain = SEQ ID NO: 491 |
| (M6903) | light chain = SEQ ID NO: 141 |
| anti-TIM3-VEGFRecd-BTLAecd | heavy chain = SEQ ID NO: 492 |
| (M6903) | light chain = SEQ ID NO: 487 |
| anti-TIM3-VEGFRecd-PD1ecd | heavy chain = SEQ ID NO: 492 |
| (M6903) | light chain = SEQ ID NO: 482 |
| anti-TIM3-VEGFRecd-SIGLEC10ecd | heavy chain = SEQ ID NO: 492 |
| (M6903) | light chain = SEQ ID NO: 483 |
| anti-TIM3-VEGFRecd-SIRPaecd | heavy chain = SEQ ID NO: 492 |
| (M6903) | light chain = SEQ ID NO: 484 |
| anti-TIM3-VEGFRecd-TIM3ecd | heavy chain = SEQ ID NO: 492 |
| (M6903) | light chain = SEQ ID NO: 485 |
| anti-TIM3-VEGFRecd | heavy chain = SEQ ID NO: 492 |
| (M6903) | light chain = SEQ ID NO: 141 |
| anti-41BB-BTLAecd-PD1ecd | heavy chain = SEQ ID NO: 493 |
| (urelumab) | light chain = SEQ ID NO: 494 |
| anti-41BB-BTLAecd-SIGLEC10ecd | heavy chain = SEQ ID NO: 493 |
| (urelumab) | light chain = SEQ ID NO: 495 |
| anti-41BB-BTLAecd-SIRPaecd | heavy chain = SEQ ID NO: 493 |
| (urelumab) | light chain = SEQ ID NO: 496 |
| anti-41BB-BTLAecd-TIM3ecd | heavy chain = SEQ ID NO: 493 |
| (urelumab) | light chain = SEQ ID NO: 497 |
| anti-41BB-BTLAecd | heavy chain = SEQ ID NO: 493 |
| (urelumab) | light chain = SEQ ID NO: 2 |
| anti-41BB-PD1ecd-BTLAecd | heavy chain = SEQ ID NO: 498 |
| (urelumab) | light chain = SEQ ID NO: 499 |
| anti-41BB-PD1ecd-SIGLEC10ecd | heavy chain = SEQ ID NO: 498 |
| (urelumab) | light chain = SEQ ID NO: 495 |
| anti-41BB-PD1ecd-SIRPaecd | heavy chain = SEQ ID NO: 498 |
| (urelumab) | light chain = SEQ ID NO: 496 |
| anti-41BB-PD1ecd-TIM3ecd | heavy chain = SEQ ID NO: 498 |
| (urelumab) | light chain = SEQ ID NO: 497 |
| anti-41BB-PD1ecd | heavy chain = SEQ ID NO: 498 |
| (urelumab) | light chain = SEQ ID NO: 2 |
| anti-41BB-SIGLEC10ecd-BTLAecd | heavy chain = SEQ ID NO: 500 |
| (urelumab) | light chain = SEQ ID NO: 499 |
| anti-41BB-SIGLEC10ecd-PD1ecd | heavy chain = SEQ ID NO: 500 |
| (urelumab) | light chain = SEQ ID NO: 494 |
| anti-41BB-SIGLEC10ecd-SIRPaecd | heavy chain = SEQ ID NO: 500 |
| (urelumab) | light chain = SEQ ID NO: 496 |
| anti-41BB-SIGLEC10ecd-TIM3ecd | heavy chain = SEQ ID NO: 500 |
| (urelumab) | light chain = SEQ ID NO: 497 |
| anti-41BB-SIGLEC10ecd | heavy chain = SEQ ID NO: 500 |
| (urelumab) | light chain = SEQ ID NO: 2 |
| anti-41BB-SIRPaecd-BTLAecd | heavy chain = SEQ ID NO: 501 |
| (urelumab) | light chain = SEQ ID NO: 499 |
| anti-41BB-SIRPaecd-PD1ecd | heavy chain = SEQ ID NO: 501 |
| (urelumab) | light chain = SEQ ID NO: 494 |
| anti-41BB-SIRPaecd-SIGLEC10ecd | heavy chain = SEQ ID NO: 501 |
| (urelumab) | light chain = SEQ ID NO: 495 |
| anti-41BB-SIRPaecd-TIM3ecd | heavy chain = SEQ ID NO: 501 |
| (urelumab) | light chain = SEQ ID NO: 497 |
| anti-41BB-SIRPaecd | heavy chain = SEQ ID NO: 501 |
| (urelumab) | light chain = SEQ ID NO: 2 |
| anti-41BB-TGFbRecd-BTLAecd | heavy chain = SEQ ID NO: 502 |
| (urelumab) | light chain = SEQ ID NO: 499 |
| anti-41BB-TGFbRecd-PD1ecd | heavy chain = SEQ ID NO: 502 |
| (urelumab) | light chain = SEQ ID NO: 494 |
| anti-41BB-TGFbRecd-SIGLEC10ecd | heavy chain = SEQ ID NO: 502 |
| (urelumab) | light chain = SEQ ID NO: 495 |
| anti-41BB-TGFbRecd-SIRPaecd | heavy chain = SEQ ID NO: 502 |
| (urelumab) | light chain = SEQ ID NO: 496 |
| anti-41BB-TGFbRecd-TIM3ecd | heavy chain = SEQ ID NO: 502 |
| (urelumab) | light chain = SEQ ID NO: 497 |
| anti-41BB-TGFbRecd | heavy chain = SEQ ID NO: 502 |
| (urelumab) | light chain = SEQ ID NO: 2 |
| anti-41BB-TIM3ecd-BTLAecd | heavy chain = SEQ ID NO: 503 |
| (urelumab) | light chain = SEQ ID NO: 499 |
| anti-41BB-TIM3ecd-PD1ecd | heavy chain = SEQ ID NO: 503 |
| (urelumab) | light chain = SEQ ID NO: 494 |
| anti-41BB-TIM3ecd-SIGLEC10ecd | heavy chain = SEQ ID NO: 503 |
| (urelumab) | light chain = SEQ ID NO: 495 |
| anti-41BB-TIM3ecd-SIRPaecd | heavy chain = SEQ ID NO: 503 |
| (urelumab) | light chain = SEQ ID NO: 496 |
| anti-41BB-TIM3ecd | heavy chain = SEQ ID NO: 503 |
| (urelumab) | light chain = SEQ ID NO: 2 |
| anti-41BB-VEGFRecd-BTLAecd | heavy chain = SEQ ID NO: 504 |
| (urelumab) | light chain = SEQ ID NO: 499 |
| anti-41BB-VEGFRecd-PD1ecd | heavy chain = SEQ ID NO: 504 |
| (urelumab) | light chain = SEQ ID NO: 494 |
| anti-41BB-VEGFRecd-SIGLEC10ecd | heavy chain = SEQ ID NO: 504 |
| (urelumab) | light chain = SEQ ID NO: 495 |
| anti-41BB-VEGFRecd-SIRPaecd | heavy chain = SEQ ID NO: 504 |
| (urelumab) | light chain = SEQ ID NO: 496 |
| anti-41BB-VEGFRecd-TIM3ecd | heavy chain = SEQ ID NO: 504 |
| (urelumab) | light chain = SEQ ID NO: 497 |
| anti-41BB-VEGFRecd | heavy chain = SEQ ID NO: 504 |
| (urelumab) | light chain = SEQ ID NO: 2 |
| anti-OX40-BTLAecd-PD1ecd | heavy chain = SEQ ID NO: 505 |
| (GSK3174998) | light chain = SEQ ID NO: 506 |
| anti-OX40-BTLAecd-SIGLEC10ecd | heavy chain = SEQ ID NO: 505 |
| (GSK3174998) | light chain = SEQ ID NO: 507 |
| anti-OX40-BTLAecd-SIRPaecd | heavy chain = SEQ ID NO: 505 |
| (GSK3174998) | light chain = SEQ ID NO: 508 |
| anti-OX40-BTLAecd-TIM3ecd | heavy chain = SEQ ID NO: 505 |
| (GSK3174998) | light chain = SEQ ID NO: 509 |
| anti-OX40-BTLAecd | heavy chain = SEQ ID NO: 505 |
| (GSK3174998) | light chain = SEQ ID NO: 97 |
| anti-OX40-PD1ecd-BTLAecd | heavy chain = SEQ ID NO: 510 |
| (GSK3174998) | light chain = SEQ ID NO: 511 |
| anti-OX40-PD1ecd-SIGLEC10ecd | heavy chain = SEQ ID NO: 510 |
| (GSK3174998) | light chain = SEQ ID NO: 507 |
| anti-OX40-PD1ecd-SIRPaecd | heavy chain = SEQ ID NO: 510 |
| (GSK3174998) | light chain = SEQ ID NO: 508 |
| anti-OX40-PD1ecd-TIM3ecd | heavy chain = SEQ ID NO: 510 |
| (GSK3174998) | light chain = SEQ ID NO: 509 |
| anti-OX40-PD1ecd | heavy chain = SEQ ID NO: 510 |
| (GSK3174998) | light chain = SEQ ID NO: 97 |
| anti-OX40-SIGLEC10ecd-BTLAecd | heavy chain = SEQ ID NO: 512 |
| (GSK3174998) | light chain = SEQ ID NO: 511 |
| anti-OX40-SIGLEC10ecd-PD1ecd | heavy chain = SEQ ID NO: 512 |
| (GSK3174998) | light chain = SEQ ID NO: 506 |
| anti-OX40-SIGLEC10ecd-SIRPaecd | heavy chain = SEQ ID NO: 512 |
| (GSK3174998) | light chain = SEQ ID NO: 508 |
| anti-OX40-SIGLEC10ecd-TIM3ecd | heavy chain = SEQ ID NO: 512 |
| (GSK3174998) | light chain = SEQ ID NO: 509 |
| anti-OX40-SIGLEC10ecd | heavy chain = SEQ ID NO: 512 |
| (GSK3174998) | light chain = SEQ ID NO: 97 |
| anti-OX40-SIRPaecd-BTLAecd | heavy chain = SEQ ID NO: 513 |
| (GSK3174998) | light chain = SEQ ID NO: 511 |
| anti-OX40-SIRPaecd-PD1ecd | heavy chain = SEQ ID NO: 513 |
| (GSK3174998) | light chain = SEQ ID NO: 506 |
| anti-OX40-SIRPaecd-SIGLEC10ecd | heavy chain = SEQ ID NO: 513 |
| (GSK3174998) | light chain = SEQ ID NO: 507 |
| anti-OX40-SIRPaecd-TIM3ecd | heavy chain = SEQ ID NO: 513 |
| (GSK3174998) | light chain = SEQ ID NO: 509 |
| anti-OX40-SIRPaecd | heavy chain = SEQ ID NO: 513 |
| (GSK3174998) | light chain = SEQ ID NO: 97 |
| anti-OX40-TGFbRecd-BTLAecd | heavy chain = SEQ ID NO: 514 |
| (GSK3174998) | light chain = SEQ ID NO: 511 |
| anti-OX40-TGFbRecd-PD1ecd | heavy chain = SEQ ID NO: 514 |
| (GSK3174998) | light chain = SEQ ID NO: 506 |
| anti-OX40-TGFbRecd-SIGLEC10ecd | heavy chain = SEQ ID NO: 514 |
| (GSK3174998) | light chain = SEQ ID NO: 507 |
| anti-OX40-TGFbRecd-SIRPaecd | heavy chain = SEQ ID NO: 514 |
| (GSK3174998) | light chain = SEQ ID NO: 508 |
| anti-OX40-TGFbRecd-TIM3ecd | heavy chain = SEQ ID NO: 514 |
| (GSK3174998) | light chain = SEQ ID NO: 509 |
| anti-OX40-TGFbRecd | heavy chain = SEQ ID NO: 514 |
| (GSK3174998) | light chain = SEQ ID NO: 97 |
| anti-OX40-TIM3ecd-BTLAecd | heavy chain = SEQ ID NO: 515 |
| (GSK3174998) | light chain = SEQ ID NO: 511 |
| anti-OX40-TIM3ecd-PD1ecd | heavy chain = SEQ ID NO: 515 |
| (GSK3174998) | light chain = SEQ ID NO: 506 |
| anti-OX40-TIM3ecd-SIGLEC10ecd | heavy chain = SEQ ID NO: 515 |
| (GSK3174998) | light chain = SEQ ID NO: 507 |
| anti-OX40-TIM3ecd-SIRPaecd | heavy chain = SEQ ID NO: 515 |
| (GSK3174998) | light chain = SEQ ID NO: 508 |
| anti-OX40-TIM3ecd | heavy chain = SEQ ID NO: 515 |
| (GSK3174998) | light chain = SEQ ID NO: 97 |
| anti-OX40-VEGFRecd-BTLAecd | heavy chain = SEQ ID NO: 516 |
| (GSK3174998) | light chain = SEQ ID NO: 511 |
| anti-OX40-VEGFRecd-PD1ecd | heavy chain = SEQ ID NO: 516 |
| (GSK3174998) | light chain = SEQ ID NO: 506 |
| anti-OX40-VEGFRecd-SIGLEC10ecd | heavy chain = SEQ ID NO: 516 |
| (GSK3174998) | light chain = SEQ ID NO: 507 |
| anti-OX40-VEGFRecd-SIRPaecd | heavy chain = SEQ ID NO: 516 |
| (GSK3174998) | light chain = SEQ ID NO: 508 |
| anti-OX40-VEGFRecd-TIM3ecd | heavy chain = SEQ ID NO: 516 |
| (GSK3174998) | light chain = SEQ ID NO: 509 |
| anti-OX40-VEGFRecd | heavy chain = SEQ ID NO: 516 |
| (GSK3174998) | light chain = SEQ ID NO: 97 |
| anti-ICOS-BTLAecd-PD1ecd | heavy chain = SEQ ID NO: 517 |
| (GSK3359609) | light chain = SEQ ID NO: 518 |
| anti-ICOS-BTLAecd-SIGLEC10ecd | heavy chain = SEQ ID NO: 517 |
| (GSK3359609) | light chain = SEQ ID NO: 519 |
| anti-ICOS-BTLAecd-SIRPaecd | heavy chain = SEQ ID NO: 517 |
| (GSK3359609) | light chain = SEQ ID NO: 520 |
| anti-ICOS-BTLAecd-TIM3ecd | heavy chain = SEQ ID NO: 517 |
| (GSK3359609) | light chain = SEQ ID NO: 521 |
| anti-ICOS-BTLAecd | heavy chain = SEQ ID NO: 517 |
| (GSK3359609) | light chain = SEQ ID NO: 59 |
| anti-ICOS-PD1ecd-BTLAecd | heavy chain = SEQ ID NO: 522 |
| (GSK3359609) | light chain = SEQ ID NO: 523 |
| anti-ICOS-PD1ecd-SIGLEC10ecd | heavy chain = SEQ ID NO: 522 |
| (GSK3359609) | light chain = SEQ ID NO: 519 |
| anti-ICOS-PD1ecd-SIRPaecd | heavy chain = SEQ ID NO: 522 |
| (GSK3359609) | light chain = SEQ ID NO: 520 |
| anti-ICOS-PD1ecd-TIM3ecd | heavy chain = SEQ ID NO: 522 |
| (GSK3359609) | light chain = SEQ ID NO: 521 |
| anti-ICOS-PD1ecd | heavy chain = SEQ ID NO: 522 |
| (GSK3359609) | light chain = SEQ ID NO: 59 |
| anti-ICOS-SIGLEC10ecd-BTLAecd | heavy chain = SEQ ID NO: 524 |
| (GSK3359609) | light chain = SEQ ID NO: 523 |
| anti-ICOS-SIGLEC10ecd-PD1ecd | heavy chain = SEQ ID NO: 524 |
| (GSK3359609) | light chain = SEQ ID NO: 518 |
| anti-ICOS-SIGLEC10ecd-SIRPaecd | heavy chain = SEQ ID NO: 524 |
| (GSK3359609) | light chain = SEQ ID NO: 520 |
| anti-ICOS-SIGLEC10ecd-TIM3ecd | heavy chain = SEQ ID NO: 524 |
| (GSK3359609) | light chain = SEQ ID NO: 521 |
| anti-ICOS-SIGLEC10ecd | heavy chain = SEQ ID NO: 524 |
| (GSK3359609) | light chain = SEQ ID NO: 59 |
| anti-ICOS-SIRPaecd-BTLAecd | heavy chain = SEQ ID NO: 525 |
| (GSK3359609) | light chain = SEQ ID NO: 523 |
| anti-ICOS-SIRPaecd-PD1ecd | heavy chain = SEQ ID NO: 525 |
| (GSK3359609) | light chain = SEQ ID NO: 518 |
| anti-ICOS-SIRPaecd-SIGLEC10ecd | heavy chain = SEQ ID NO: 525 |
| (GSK3359609) | light chain = SEQ ID NO: 519 |
| anti-ICOS-SIRPaecd-TIM3ecd | heavy chain = SEQ ID NO: 525 |
| (GSK3359609) | light chain = SEQ ID NO: 521 |
| anti-ICOS-SIRPaecd | heavy chain = SEQ ID NO: 525 |
| (GSK3359609) | light chain = SEQ ID NO: 59 |
| anti-ICOS-TGFbRecd-BTLAecd | heavy chain = SEQ ID NO: 526 |
| (GSK3359609) | light chain = SEQ ID NO: 523 |
| anti-ICOS-TGFbRecd-PD1ecd | heavy chain = SEQ ID NO: 526 |
| (GSK3359609) | light chain = SEQ ID NO: 518 |
| anti-ICOS-TGFbRecd-SIGLEC10ecd | heavy chain = SEQ ID NO: 526 |
| (GSK3359609) | light chain = SEQ ID NO: 519 |
| anti-ICOS-TGFbRecd-SIRPaecd | heavy chain = SEQ ID NO: 526 |
| (GSK3359609) | light chain = SEQ ID NO: 520 |
| anti-ICOS-TGFbRecd-TIM3ecd | heavy chain = SEQ ID NO: 526 |
| (GSK3359609) | light chain = SEQ ID NO: 521 |
| anti-ICOS-TGFbRecd | heavy chain = SEQ ID NO: 526 |
| (GSK3359609) | light chain = SEQ ID NO: 59 |
| anti-ICOS-TIM3ecd-BTLAecd | heavy chain = SEQ ID NO: 527 |
| (GSK3359609) | light chain = SEQ ID NO: 523 |
| anti-ICOS-TIM3ecd-PD1ecd | heavy chain = SEQ ID NO: 527 |
| (GSK3359609) | light chain = SEQ ID NO: 518 |
| anti-ICOS-TIM3ecd-SIGLEC10ecd | heavy chain = SEQ ID NO: 527 |
| (GSK3359609) | light chain = SEQ ID NO: 519 |
| anti-ICOS-TIM3ecd-SIRPaecd | heavy chain = SEQ ID NO: 527 |
| (GSK3359609) | light chain = SEQ ID NO: 520 |
| anti-ICOS-TIM3ecd | heavy chain = SEQ ID NO: 527 |
| (GSK3359609) | light chain = SEQ ID NO: 59 |
| anti-ICOS-VEGFRecd-BTLAecd | heavy chain = SEQ ID NO: 528 |
| (GSK3359609) | light chain = SEQ ID NO: 523 |
| anti-ICOS-VEGFRecd-PD1ecd | heavy chain = SEQ ID NO: 528 |
| (GSK3359609) | light chain = SEQ ID NO: 518 |
| anti-ICOS-VEGFRecd-SIGLEC10ecd | heavy chain = SEQ ID NO: 528 |
| (GSK3359609) | light chain = SEQ ID NO: 519 |
| anti-ICOS-VEGFRecd-SIRPaecd | heavy chain = SEQ ID NO: 528 |
| (GSK3359609) | light chain = SEQ ID NO: 520 |
| anti-ICOS-VEGFRecd-TIM3ecd | heavy chain = SEQ ID NO: 528 |
| (GSK3359609) | light chain = SEQ ID NO: 521 |
| anti-ICOS-VEGFRecd | heavy chain = SEQ ID NO: 528 |
| (GSK3359609) | light chain = SEQ ID NO: 59 |
| BTLAecd-Fc-PD1ecd | SEQ ID NO: 529 |
| BTLAecd-Fc-SIGLEC10ecd | SEQ ID NO: 530 |
| BTLAecd-Fc-SIRPaecd | SEQ ID NO: 531 |
| BTLAecd-Fc-TGFbRecd | SEQ ID NO: 532 |
| BTLAecd-Fc-TIM3ecd | SEQ ID NO: 533 |
| BTLAecd-Fc-VEGFRecd | SEQ ID NO: 534 |
| PD1ecd-Fc-BTLAecd | SEQ ID NO: 535 |
| PD1ecd-Fc-SIGLEC10ecd | SEQ ID NO: 536 |
| PD1ecd-Fc-SIRPaecd | SEQ ID NO: 537 |
| PD1ecd-Fc-TGFbRecd | SEQ ID NO: 538 |
| PD1ecd-Fc-TIM3ecd | SEQ ID NO: 539 |
| PD1ecd-Fc-VEGFRecd | SEQ ID NO: 540 |
| SIGLEC10ecd-Fc-BTLAecd | SEQ ID NO: 541 |
| SIGLEC10ecd-Fc-PD1ecd | SEQ ID NO: 542 |
| SIGLEC10ecd-Fc-SIRPaecd | SEQ ID NO: 543 |
| SIGLEC10ecd-Fc-TGFbRecd | SEQ ID NO: 544 |
| SIGLEC10ecd-Fc-TIM3ecd | SEQ ID NO: 545 |
| SIGLEC10ecd-Fc-VEGFRecd | SEQ ID NO: 546 |
| SIRPaecd-Fc-BTLAecd | SEQ ID NO: 547 |
| SIRPaecd-Fc-PD1ecd | SEQ ID NO: 548 |
| SIRPaecd-Fc-SIGLEC10ecd | SEQ ID NO: 549 |
| SIRPaecd-Fc-TGFbRecd | SEQ ID NO: 550 |
| SIRPaecd-Fc-TIM3ecd | SEQ ID NO: 551 |
| SIRPaecd-Fc-VEGFRecd | SEQ ID NO: 552 |
| TGFbRecd-Fc-BTLAecd | SEQ ID NO: 553 |
| TGFbRecd-Fc-PD1ecd | SEQ ID NO: 554 |
| TGFbRecd-Fc-SIGLEC10ecd | SEQ ID NO: 555 |
| TGFbRecd-Fc-SIRPaecd | SEQ ID NO: 556 |
| TGFbRecd-Fc-TIM3ecd | SEQ ID NO: 557 |
| TGFbRecd-Fc-VEGFRecd | SEQ ID NO: 558 |
| TIM3ecd-Fc-BTLAecd | SEQ ID NO: 559 |
| TIM3ecd-Fc-PD1ecd | SEQ ID NO: 560 |
| TIM3ecd-Fc-SIGLEC10ecd | SEQ ID NO: 561 |
| TIM3ecd-Fc-SIRPaecd | SEQ ID NO: 562 |
| TIM3ecd-Fc-TGFbRecd | SEQ ID NO: 563 |
| TIM3ecd-Fc-VEGFRecd | SEQ ID NO: 564 |
| VEGFRecd-Fc-BTLAecd | SEQ ID NO: 565 |
| VEGFRecd-Fc-PD1ecd | SEQ ID NO: 566 |
| VEGFRecd-Fc-SIGLEC10ecd | SEQ ID NO: 567 |
| VEGFRecd-Fc-SIRPaecd | SEQ ID NO: 568 |
| VEGFRecd-Fc-TGFbRecd | SEQ ID NO: 569 |
| VEGFRecd-Fc-TIM3ecd | SEQ ID NO: 570 |
| BTLAecd-Fc-IL12ecd | SEQ ID NO: 571 |
| IL12ecd-Fc-BTLAecd | SEQ ID NO: 572 |
| BTLAecd-Fc-IL15ecd | SEQ ID NO: 573 |
| IL15ecd-Fc-BTLAecd | SEQ ID NO: 574 |
| PD1ecd-Fc-IL12ecd | SEQ ID NO: 575 |
| IL12ecd-Fc-PD1ecd | SEQ ID NO: 576 |
| PD1ecd-Fc-IL15ecd | SEQ ID NO: 577 |
| IL15ecd-Fc-PD1ecd | SEQ ID NO: 578 |
| SIGLEC10ecd-Fc-IL12ecd | SEQ ID NO: 579 |
| IL12ecd-Fc-SIGLEC10ecd | SEQ ID NO: 580 |
| SIGLEC10ecd-Fc-IL15ecd | SEQ ID NO: 581 |
| IL15ecd-Fc-SIGLEC10ecd | SEQ ID NO: 582 |
| SIRPaecd-Fc-IL12ecd | SEQ ID NO: 583 |
| IL12ecd-Fc-SIRPaecd | SEQ ID NO: 584 |
| SIRPaecd-Fc-IL15ecd | SEQ ID NO: 585 |
| IL15ecd-Fc-SIRPaecd | SEQ ID NO: 586 |
| TGFbRecd-Fc-IL12ecd | SEQ ID NO: 587 |
| IL12ecd-Fc-TGFbRecd | SEQ ID NO: 588 |
| TGFbRecd-Fc-IL15ecd | SEQ ID NO: 589 |
| IL15ecd-Fc-TGFbRecd | SEQ ID NO: 590 |
| TIM3ecd-Fc-IL12ecd | SEQ ID NO: 591 |
| IL12ecd-Fc-TIM3ecd | SEQ ID NO: 592 |
| TIM3ecd-Fc-IL15ecd | SEQ ID NO: 593 |
| IL15ecd-Fc-TIM3ecd | SEQ ID NO: 594 |
| VEGFRecd-Fc-IL12ecd | SEQ ID NO: 595 |
| IL12ecd-Fc-VEGFRecd | SEQ ID NO: 596 |
| VEGFRecd-Fc-IL15ecd | SEQ ID NO: 597 |
| IL15ecd-Fc-VEGFRecd | SEQ ID NO: 598 |
| SIGLEC10ecd-Fc-41BBLecd | SEQ ID NO: 599 |
| 41BBLecd-Fc-SIGLEC10ecd | SEQ ID NO: 600 |
| SIGLEC10ecd-Fc-CD30Lecd | SEQ ID NO: 601 |
| CD30Lecd-Fc-SIGLEC10ecd | SEQ ID NO: 602 |
| SIGLEC10ecd-Fc-CD40Lecd | SEQ ID NO: 603 |
| CD40Lecd-Fc-SIGLEC10ecd | SEQ ID NO: 604 |
| SIGLEC10ecd-Fc-CD70ecd | SEQ ID NO: 605 |
| CD70ecd-Fc-SIGLEC10ecd | SEQ ID NO: 606 |
| SIGLEC10ecd-Fc-GITRLecd | SEQ ID NO: 607 |
| GITRLecd-Fc-SIGLEC10ecd | SEQ ID NO: 608 |
| SIGLEC10ecd-Fc-ICOSLecd | SEQ ID NO: 609 |
| ICOSLecd-Fc-SIGLEC10ecd | SEQ ID NO: 610 |
| SIGLEC10ecd-Fc-IL12ecd | SEQ ID NO: 579 |
| IL12ecd-Fc-SIGLEC10ecd | SEQ ID NO: 580 |
| SIGLEC10ecd-Fc-IL15ecd | SEQ ID NO: 581 |
| IL15ecd-Fc-SIGLEC10ecd | SEQ ID NO: 582 |
| SIGLEC10ecd-Fc-LIGHTecd | SEQ ID NO: 611 |
| LIGHTecd-Fc-SIGLEC10ecd | SEQ ID NO: 612 |
| SIGLEC10ecd-Fc-OX40Lecd | SEQ ID NO: 613 |
| OX40Lecd-Fc-SIGLEC10ecd | SEQ ID NO: 614 |
| TGFbRecd-Fc-41BBLecd | SEQ ID NO: 615 |
| 41BBLecd-Fc-TGFbRecd | SEQ ID NO: 616 |
| TGFbRecd-Fc-CD30Lecd | SEQ ID NO: 617 |
| CD30Lecd-Fc-TGFbRecd | SEQ ID NO: 618 |
| TGFbRecd-Fc-CD40Lecd | SEQ ID NO: 619 |
| CD40Lecd-Fc-TGFbRecd | SEQ ID NO: 620 |
| TGFbRecd-Fc-CD70ecd | SEQ ID NO: 621 |
| CD70ecd-Fc-TGFbRecd | SEQ ID NO: 622 |
| TGFbRecd-Fc-GITRLecd | SEQ ID NO: 623 |
| GITRLecd-Fc-TGFbRecd | SEQ ID NO: 624 |
| TGFbRecd-Fc-ICOSLecd | SEQ ID NO: 625 |
| ICOSLecd-Fc-TGFbRecd | SEQ ID NO: 626 |
| TGFbRecd-Fc-IL12ecd | SEQ ID NO: 587 |
| IL12ecd-Fc-TGFbRecd | SEQ ID NO: 588 |
| TGFbRecd-Fc-IL15ecd | SEQ ID NO: 589 |
| IL15ecd-Fc-TGFbRecd | SEQ ID NO: 590 |
| TGFbRecd-Fc-LIGHTecd | SEQ ID NO: 627 |
| LIGHTecd-Fc-TGFbRecd | SEQ ID NO: 628 |
| TGFbRecd-Fc-OX40Lecd | SEQ ID NO: 629 |
| OX40Lecd-Fc-TGFbRecd | SEQ ID NO: 630 |
| VEGFRecd-Fc-41BBLecd | SEQ ID NO: 631 |
| 41BBLecd-Fc-VEGFRecd | SEQ ID NO: 632 |
| VEGFRecd-Fc-CD30Lecd | SEQ ID NO: 633 |
| CD30Lecd-Fc-VEGFRecd | SEQ ID NO: 634 |
| VEGFRecd-Fc-CD40Lecd | SEQ ID NO: 635 |
| CD40Lecd-Fc-VEGFRecd | SEQ ID NO: 636 |
| VEGFRecd-Fc-CD70ecd | SEQ ID NO: 637 |
| CD70ecd-Fc-VEGFRecd | SEQ ID NO: 638 |
| VEGFRecd-Fc-GITRLecd | SEQ ID NO: 639 |
| GITRLecd-Fc-VEGFRecd | SEQ ID NO: 640 |
| VEGFRecd-Fc-ICOSLecd | SEQ ID NO: 641 |
| ICOSLecd-Fc-VEGFRecd | SEQ ID NO: 642 |
| VEGFRecd-Fc-IL12ecd | SEQ ID NO: 595 |
| IL12ecd-Fc-VEGFRecd | SEQ ID NO: 596 |
| VEGFRecd-Fc-IL15ecd | SEQ ID NO: 597 |
| IL15ecd-Fc-VEGFRecd | SEQ ID NO: 598 |
| VEGFRecd-Fc-LIGHTecd | SEQ ID NO: 643 |
| LIGHTecd-Fc-VEGFRecd | SEQ ID NO: 644 |
| VEGFRecd-Fc-OX40Lecd | SEQ ID NO: 645 |
| OX40Lecd-Fc-VEGFRecd | SEQ ID NO: 646 |
| anti-PDL1-41BBLecd | heavy chain = SEQ ID NO: 647 |
| (atezolizumab) | light chain = SEQ ID NO: 109 |
| anti-PDL1-41BBLecd-BTLAecd | heavy chain = SEQ ID NO: 647 |
| (atezolizumab) | light chain = SEQ ID NO: 464 |
| anti-PDL1-41BBLecd-SIGLEC10ecd | heavy chain = SEQ ID NO: 647 |
| (atezolizumab) | light chain = SEQ ID NO: 460 |
| anti-PDL1-41BBLecd-SIRPaecd | heavy chain = SEQ ID NO: 647 |
| (atezolizumab) | light chain = SEQ ID NO: 461 |
| anti-PDL1-41BBLecd-TIM3ecd | heavy chain = SEQ ID NO: 647 |
| (atezolizumab) | light chain = SEQ ID NO: 462 |
| anti-PDL1-CD30Lecd | heavy chain = SEQ ID NO: 648 |
| (atezolizumab) | light chain = SEQ ID NO: 109 |
| anti-PDL1-CD30Lecd-BTLAecd | heavy chain = SEQ ID NO: 648 |
| (atezolizumab) | light chain = SEQ ID NO: 464 |
| anti-PDL1-CD30Lecd-SIGLEC10ecd | heavy chain = SEQ ID NO: 648 |
| (atezolizumab) | light chain = SEQ ID NO: 460 |
| anti-PDL1-CD30Lecd-SIRPaecd | heavy chain = SEQ ID NO: 648 |
| (atezolizumab) | light chain = SEQ ID NO: 461 |
| anti-PDL1-CD30Lecd-TIM3ecd | heavy chain = SEQ ID NO: 648 |
| (atezolizumab) | light chain = SEQ ID NO: 462 |
| anti-PDL1-CD40Lecd | heavy chain = SEQ ID NO: 649 |
| (atezolizumab) | light chain = SEQ ID NO: 109 |
| anti-PDL1-CD40Lecd-BTLAecd | heavy chain = SEQ ID NO: 649 |
| (atezolizumab) | light chain = SEQ ID NO: 464 |
| anti-PDL1-CD40Lecd-SIGLEC10ecd | heavy chain = SEQ ID NO: 649 |
| (atezolizumab) | light chain = SEQ ID NO: 460 |
| anti-PDL1-CD40Lecd-SIRPaecd | heavy chain = SEQ ID NO: 649 |
| (atezolizumab) | light chain = SEQ ID NO: 461 |
| anti-PDL1-CD40Lecd-TIM3ecd | heavy chain = SEQ ID NO: 649 |
| (atezolizumab) | light chain = SEQ ID NO: 462 |
| anti-PDL1-CD70ecd | heavy chain = SEQ ID NO: 650 |
| (atezolizumab) | light chain = SEQ ID NO: 109 |
| anti-PDL1-CD70ecd-BTLAecd | heavy chain = SEQ ID NO: 650 |
| (atezolizumab) | light chain = SEQ ID NO: 464 |
| anti-PDL1-CD70ecd-SIGLEC10ecd | heavy chain = SEQ ID NO: 650 |
| (atezolizumab) | light chain = SEQ ID NO: 460 |
| anti-PDL1-CD70ecd-SIRPaecd | heavy chain = SEQ ID NO: 650 |
| (atezolizumab) | light chain = SEQ ID NO: 461 |
| anti-PDL1-CD70ecd-TIM3ecd | heavy chain = SEQ ID NO: 650 |
| (atezolizumab) | light chain = SEQ ID NO: 462 |
| anti-PDL1-GITRLecd | heavy chain = SEQ ID NO: 651 |
| (atezolizumab) | light chain = SEQ ID NO: 109 |
| anti-PDL1-GITRLecd-BTLAecd | heavy chain = SEQ ID NO: 651 |
| (atezolizumab) | light chain = SEQ ID NO: 464 |
| anti-PDL1-GITRLecd-SIGLEC10ecd | heavy chain = SEQ ID NO: 651 |
| (atezolizumab) | light chain = SEQ ID NO: 460 |
| anti-PDL1-GITRLecd-SIRPaecd | heavy chain = SEQ ID NO: 651 |
| (atezolizumab) | light chain = SEQ ID NO: 461 |
| anti-PDL1-GITRLecd-TIM3ecd | heavy chain = SEQ ID NO: 651 |
| (atezolizumab) | light chain = SEQ ID NO: 462 |
| anti-PDL1-ICOSLecd | heavy chain = SEQ ID NO: 652 |
| (atezolizumab) | light chain = SEQ ID NO: 109 |
| anti-PDL1-ICOSLecd-BTLAecd | heavy chain = SEQ ID NO: 652 |
| (atezolizumab) | light chain = SEQ ID NO: 464 |
| anti-PDL1-ICOSLecd-SIGLEC10ecd | heavy chain = SEQ ID NO: 652 |
| (atezolizumab) | light chain = SEQ ID NO: 460 |
| anti-PDL1-ICOSLecd-SIRPaecd | heavy chain = SEQ ID NO: 652 |
| (atezolizumab) | light chain = SEQ ID NO: 461 |
| anti-PDL1-ICOSLecd-TIM3ecd | heavy chain = SEQ ID NO: 652 |
| (atezolizumab) | light chain = SEQ ID NO: 462 |
| anti-PDL1-IL12ecd | heavy chain = SEQ ID NO: 653 |
| (atezolizumab) | light chain = SEQ ID NO: 109 |
| anti-PDL1-IL12ecd-BTLAecd | heavy chain = SEQ ID NO: 653 |
| (atezolizumab) | light chain = SEQ ID NO: 464 |
| anti-PDL1-IL12ecd-SIGLEC10ecd | heavy chain = SEQ ID NO: 653 |
| (atezolizumab) | light chain = SEQ ID NO: 460 |
| anti-PDL1-IL12ecd-SIRPaecd | heavy chain = SEQ ID NO: 653 |
| (atezolizumab) | light chain = SEQ ID NO: 461 |
| anti-PDL1-IL12ecd-TIM3ecd | heavy chain = SEQ ID NO: 653 |
| (atezolizumab) | light chain = SEQ ID NO: 462 |
| anti-PDL1-IL15ecd | heavy chain = SEQ ID NO: 654 |
| (atezolizumab) | light chain = SEQ ID NO: 109 |
| anti-PDL1-IL15ecd-BTLAecd | heavy chain = SEQ ID NO: 654 |
| (atezolizumab) | light chain = SEQ ID NO: 464 |
| anti-PDL1-IL15ecd-SIGLEC10ecd | heavy chain = SEQ ID NO: 654 |
| (atezolizumab) | light chain = SEQ ID NO: 460 |
| anti-PDL1-IL15ecd-SIRPaecd | heavy chain = SEQ ID NO: 654 |
| (atezolizumab) | light chain = SEQ ID NO: 461 |
| anti-PDL1-IL15ecd-TIM3ecd | heavy chain = SEQ ID NO: 654 |
| (atezolizumab) | light chain = SEQ ID NO: 462 |
| anti-PDL1-LIGHTecd | heavy chain = SEQ ID NO: 655 |
| (atezolizumab) | light chain = SEQ ID NO: 109 |
| anti-PDL1-LIGHTecd-BTLAecd | heavy chain = SEQ ID NO: 655 |
| (atezolizumab) | light chain = SEQ ID NO: 464 |
| anti-PDL1-LIGHTecd-SIGLEC10ecd | heavy chain = SEQ ID NO: 655 |
| (atezolizumab) | light chain = SEQ ID NO: 460 |
| anti-PDL1-LIGHTecd-SIRPaecd | heavy chain = SEQ ID NO: 655 |
| (atezolizumab) | light chain = SEQ ID NO: 461 |
| anti-PDL1-LIGHTecd-TIM3ecd | heavy chain = SEQ ID NO: 655 |
| (atezolizumab) | light chain = SEQ ID NO: 462 |
| anti-PDL1-OX40Lecd | heavy chain = SEQ ID NO: 656 |
| (atezolizumab) | light chain = SEQ ID NO: 109 |
| anti-PDL1-OX40Lecd-BTLAecd | heavy chain = SEQ ID NO: 656 |
| (atezolizumab) | light chain = SEQ ID NO: 464 |
| anti-PDL1-OX40Lecd-SIGLEC10ecd | heavy chain = SEQ ID NO: 656 |
| (atezolizumab) | light chain = SEQ ID NO: 460 |
| anti-PDL1-OX40Lecd-SIRPaecd | heavy chain = SEQ ID NO: 656 |
| (atezolizumab) | light chain = SEQ ID NO: 461 |
| anti-PDL1-OX40Lecd-TIM3ecd | heavy chain = SEQ ID NO: 656 |
| (atezolizumab) | light chain = SEQ ID NO: 462 |
| anti-PDL1-BTLAecd-41BBLecd | heavy chain = SEQ ID NO: 459 |
| (atezolizumab) | light chain = SEQ ID NO: 657 |
| anti-PDL1-BTLAecd-CD30Lecd | heavy chain = SEQ ID NO: 459 |
| (atezolizumab) | light chain = SEQ ID NO: 658 |
| anti-PDL1-BTLAecd-CD40Lecd | heavy chain = SEQ ID NO: 459 |
| (atezolizumab) | light chain = SEQ ID NO: 659 |
| anti-PDL1-BTLAecd-CD70ecd | heavy chain = SEQ ID NO: 459 |
| (atezolizumab) | light chain = SEQ ID NO: 660 |
| anti-PDL1-BTLAecd-GITRLecd | heavy chain = SEQ ID NO: 459 |
| (atezolizumab) | light chain = SEQ ID NO: 661 |
| anti-PDL1-BTLAecd-ICOSLecd | heavy chain = SEQ ID NO: 459 |
| (atezolizumab) | light chain = SEQ ID NO: 662 |
| anti-PDL1-BTLAecd-IL12ecd | heavy chain = SEQ ID NO: 459 |
| (atezolizumab) | light chain = SEQ ID NO: 663 |
| anti-PDL1-BTLAecd-IL15ecd | heavy chain = SEQ ID NO: 459 |
| (atezolizumab) | light chain = SEQ ID NO: 664 |
| anti-PDL1-BTLAecd-LIGHTecd | heavy chain = SEQ ID NO: 459 |
| (atezolizumab) | light chain = SEQ ID NO: 665 |
| anti-PDL1-BTLAecd-OX40Lecd | heavy chain = SEQ ID NO: 459 |
| (atezolizumab) | light chain = SEQ ID NO: 666 |
| anti-PDL1-SIGLEC10ecd-41BBLecd | heavy chain = SEQ ID NO: 463 |
| (atezolizumab) | light chain = SEQ ID NO: 657 |
| anti-PDL1-SIGLEC10ecd-CD30Lecd | heavy chain = SEQ ID NO: 463 |
| (atezolizumab) | light chain = SEQ ID NO: 658 |
| anti-PDL1-SIGLEC10ecd-CD40Lecd | heavy chain = SEQ ID NO: 463 |
| (atezolizumab) | light chain = SEQ ID NO: 659 |
| anti-PDL1-SIGLEC10ecd-CD70ecd | heavy chain = SEQ ID NO: 463 |
| (atezolizumab) | light chain = SEQ ID NO: 660 |
| anti-PDL1-SIGLEC10ecd-GITRLecd | heavy chain = SEQ ID NO: 463 |
| (atezolizumab) | light chain = SEQ ID NO: 661 |
| anti-PDL1-SIGLEC10ecd-ICOSLecd | heavy chain = SEQ ID NO: 463 |
| (atezolizumab) | light chain = SEQ ID NO: 662 |
| anti-PDL1-SIGLEC10ecd-IL12ecd | heavy chain = SEQ ID NO: 463 |
| (atezolizumab) | light chain = SEQ ID NO: 663 |
| anti-PDL1-SIGLEC10ecd-IL15ecd | heavy chain = SEQ ID NO: 463 |
| (atezolizumab) | light chain = SEQ ID NO: 664 |
| anti-PDL1-SIGLEC10ecd-LIGHTecd | heavy chain = SEQ ID NO: 463 |
| (atezolizumab) | light chain = SEQ ID NO: 665 |
| anti-PDL1-SIGLEC10ecd-OX40Lecd | heavy chain = SEQ ID NO: 463 |
| (atezolizumab) | light chain = SEQ ID NO: 666 |
| anti-PDL1-SIRPaecd-41BBLecd | heavy chain = SEQ ID NO: 465 |
| (atezolizumab) | light chain = SEQ ID NO: 657 |
| anti-PDL1-SIRPaecd-CD30Lecd | heavy chain = SEQ ID NO: 465 |
| (atezolizumab) | light chain = SEQ ID NO: 658 |
| anti-PDL1-SIRPaecd-CD40Lecd | heavy chain = SEQ ID NO: 465 |
| (atezolizumab) | light chain = SEQ ID NO: 659 |
| anti-PDL1-SIRPaecd-CD70ecd | heavy chain = SEQ ID NO: 465 |
| (atezolizumab) | light chain = SEQ ID NO: 660 |
| anti-PDL1-SIRPaecd-GITRLecd | heavy chain = SEQ ID NO: 465 |
| (atezolizumab) | light chain = SEQ ID NO: 661 |
| anti-PDL1-SIRPaecd-ICOSLecd | heavy chain = SEQ ID NO: 465 |
| (atezolizumab) | light chain = SEQ ID NO: 662 |
| anti-PDL1-SIRPaecd-IL12ecd | heavy chain = SEQ ID NO: 465 |
| (atezolizumab) | light chain = SEQ ID NO: 663 |
| anti-PDL1-SIRPaecd-IL15ecd | heavy chain = SEQ ID NO: 465 |
| (atezolizumab) | light chain = SEQ ID NO: 664 |
| anti-PDL1-SIRPaecd-LIGHTecd | heavy chain = SEQ ID NO: 465 |
| (atezolizumab) | light chain = SEQ ID NO: 665 |
| anti-PDL1-SIRPaecd-OX40Lecd | heavy chain = SEQ ID NO: 465 |
| (atezolizumab) | light chain = SEQ ID NO: 666 |
| anti-PDL1-TGFbRecd-41BBLecd | heavy chain = SEQ ID NO: 466 |
| (atezolizumab) | light chain = SEQ ID NO: 657 |
| anti-PDL1-TGFbRecd-CD30Lecd | heavy chain = SEQ ID NO: 466 |
| (atezolizumab) | light chain = SEQ ID NO: 658 |
| anti-PDL1-TGFbRecd-CD40Lecd | heavy chain = SEQ ID NO: 466 |
| (atezolizumab) | light chain = SEQ ID NO: 659 |
| anti-PDL1-TGFbRecd-CD70ecd | heavy chain = SEQ ID NO: 466 |
| (atezolizumab) | light chain = SEQ ID NO: 660 |
| anti-PDL1-TGFbRecd-GITRLecd | heavy chain = SEQ ID NO: 466 |
| (atezolizumab) | light chain = SEQ ID NO: 661 |
| anti-PDL1-TGFbRecd-ICOSLecd | heavy chain = SEQ ID NO: 466 |
| (atezolizumab) | light chain = SEQ ID NO: 662 |
| anti-PDL1-TGFbRecd-IL12ecd | heavy chain = SEQ ID NO: 466 |
| (atezolizumab) | light chain = SEQ ID NO: 663 |
| anti-PDL1-TGFbRecd-IL15ecd | heavy chain = SEQ ID NO: 466 |
| (atezolizumab) | light chain = SEQ ID NO: 664 |
| anti-PDL1-TGFbRecd-LIGHTecd | heavy chain = SEQ ID NO: 466 |
| (atezolizumab) | light chain = SEQ ID NO: 665 |
| anti-PDL1-TGFbRecd-OX40Lecd | heavy chain = SEQ ID NO: 466 |
| (atezolizumab) | light chain = SEQ ID NO: 666 |
| anti-PDL1-TIM3ecd-41BBLecd | heavy chain = SEQ ID NO: 467 |
| (atezolizumab) | light chain = SEQ ID NO: 657 |
| anti-PDL1-TIM3ecd-CD30Lecd | heavy chain = SEQ ID NO: 467 |
| (atezolizumab) | light chain = SEQ ID NO: 658 |
| anti-PDL1-TIM3ecd-CD40Lecd | heavy chain = SEQ ID NO: 467 |
| (atezolizumab) | light chain = SEQ ID NO: 659 |
| anti-PDL1-TIM3ecd-CD70ecd | heavy chain = SEQ ID NO: 467 |
| (atezolizumab) | light chain = SEQ ID NO: 660 |
| anti-PDL1-TIM3ecd-GITRLecd | heavy chain = SEQ ID NO: 467 |
| (atezolizumab) | light chain = SEQ ID NO: 661 |
| anti-PDL1-TIM3ecd-ICOSLecd | heavy chain = SEQ ID NO: 467 |
| (atezolizumab) | light chain = SEQ ID NO: 662 |
| anti-PDL1-TIM3ecd-IL12ecd | heavy chain = SEQ ID NO: 467 |
| (atezolizumab) | light chain = SEQ ID NO: 663 |
| anti-PDL1-TIM3ecd-IL15ecd | heavy chain = SEQ ID NO: 467 |
| (atezolizumab) | light chain = SEQ ID NO: 664 |
| anti-PDL1-TIM3ecd-LIGHTecd | heavy chain = SEQ ID NO: 467 |
| (atezolizumab) | light chain = SEQ ID NO: 665 |
| anti-PDL1-TIM3ecd-OX40Lecd | heavy chain = SEQ ID NO: 467 |
| (atezolizumab) | light chain = SEQ ID NO: 666 |
| anti-PDL1-VEGFRecd-41BBLecd | heavy chain = SEQ ID NO: 468 |
| (atezolizumab) | light chain = SEQ ID NO: 657 |
| anti-PDL1-VEGFRecd-CD30Lecd | heavy chain = SEQ ID NO: 468 |
| (atezolizumab) | light chain = SEQ ID NO: 658 |
| anti-PDL1-VEGFRecd-CD40Lecd | heavy chain = SEQ ID NO: 468 |
| (atezolizumab) | light chain = SEQ ID NO: 659 |
| anti-PDL1-VEGFRecd-CD70ecd | heavy chain = SEQ ID NO: 468 |
| (atezolizumab) | light chain = SEQ ID NO: 660 |
| anti-PDL1-VEGFRecd-GITRLecd | heavy chain = SEQ ID NO: 468 |
| (atezolizumab) | light chain = SEQ ID NO: 661 |
| anti-PDL1-VEGFRecd-ICOSLecd | heavy chain = SEQ ID NO: 468 |
| (atezolizumab) | light chain = SEQ ID NO: 662 |
| anti-PDL1-VEGFRecd-IL12ecd | heavy chain = SEQ ID NO: 468 |
| (atezolizumab) | light chain = SEQ ID NO: 663 |
| anti-PDL1-VEGFRecd-IL15ecd | heavy chain = SEQ ID NO: 468 |
| (atezolizumab) | light chain = SEQ ID NO: 664 |
| anti-PDL1-VEGFRecd-LIGHTecd | heavy chain = SEQ ID NO: 468 |
| (atezolizumab) | light chain = SEQ ID NO: 665 |
| anti-PDL1-VEGFRecd-OX40Lecd | heavy chain = SEQ ID NO: 468 |
| (atezolizumab) | light chain = SEQ ID NO: 666 |
| anti-EGFR-41BBLecd | heavy chain = SEQ ID NO: 667 |
| (cetuximab) | light chain = SEQ ID NO: 43 |
| anti-EGFR-41BBLecd-BTLAecd | heavy chain = SEQ ID NO: 667 |
| (cetuximab) | light chain = SEQ ID NO: 226 |
| anti-EGFR-41BBLecd-PD1ecd | heavy chain = SEQ ID NO: 667 |
| (cetuximab) | light chain = SEQ ID NO: 221 |
| anti-EGFR-41BBLecd-SIGLEC10ecd | heavy chain = SEQ ID NO: 667 |
| (cetuximab) | light chain = SEQ ID NO: 222 |
| anti-EGFR-41BBLecd-SIRPaecd | heavy chain = SEQ ID NO: 667 |
| (cetuximab) | light chain = SEQ ID NO: 223 |
| anti-EGFR-41BBLecd-TIM3ecd | heavy chain = SEQ ID NO: 667 |
| (cetuximab) | light chain = SEQ ID NO: 224 |
| anti-EGFR-CD30Lecd | heavy chain = SEQ ID NO: 668 |
| (cetuximab) | light chain = SEQ ID NO: 43 |
| anti-EGFR-CD30Lecd-BTLAecd | heavy chain = SEQ ID NO: 668 |
| (cetuximab) | light chain = SEQ ID NO: 226 |
| anti-EGFR-CD30Lecd-PD1ecd | heavy chain = SEQ ID NO: 668 |
| (cetuximab) | light chain = SEQ ID NO: 221 |
| anti-EGFR-CD30Lecd-SIGLEC10ecd | heavy chain = SEQ ID NO: 668 |
| (cetuximab) | light chain = SEQ ID NO: 222 |
| anti-EGFR-CD30Lecd-SIRPaecd | heavy chain = SEQ ID NO: 668 |
| (cetuximab) | light chain = SEQ ID NO: 223 |
| anti-EGFR-CD30Lecd-TIM3ecd | heavy chain = SEQ ID NO: 668 |
| (cetuximab) | light chain = SEQ ID NO: 224 |
| anti-EGFR-CD40Lecd | heavy chain = SEQ ID NO: 669 |
| (cetuximab) | light chain = SEQ ID NO: 43 |
| anti-EGFR-CD40Lecd-BTLAecd | heavy chain = SEQ ID NO: 669 |
| (cetuximab) | light chain = SEQ ID NO: 226 |
| anti-EGFR-CD40Lecd-PD1ecd | heavy chain = SEQ ID NO: 669 |
| (cetuximab) | light chain = SEQ ID NO: 221 |
| anti-EGFR-CD40Lecd-SIGLEC10ecd | heavy chain = SEQ ID NO: 669 |
| (cetuximab) | light chain = SEQ ID NO: 222 |
| anti-EGFR-CD40Lecd-SIRPaecd | heavy chain = SEQ ID NO: 669 |
| (cetuximab) | light chain = SEQ ID NO: 223 |
| anti-EGFR-CD40Lecd-TIM3ecd | heavy chain = SEQ ID NO: 669 |
| (cetuximab) | light chain = SEQ ID NO: 224 |
| anti-EGFR-CD70ecd | heavy chain = SEQ ID NO: 670 |
| (cetuximab) | light chain = SEQ ID NO: 43 |
| anti-EGFR-CD70ecd-BTLAecd | heavy chain = SEQ ID NO: 670 |
| (cetuximab) | light chain = SEQ ID NO: 226 |
| anti-EGFR-CD70ecd-PD1ecd | heavy chain = SEQ ID NO: 670 |
| (cetuximab) | light chain = SEQ ID NO: 221 |
| anti-EGFR-CD70ecd-SIGLEC10ecd | heavy chain = SEQ ID NO: 670 |
| (cetuximab) | light chain = SEQ ID NO: 222 |
| anti-EGFR-CD70ecd-SIRPaecd | heavy chain = SEQ ID NO: 670 |
| (cetuximab) | light chain = SEQ ID NO: 223 |
| anti-EGFR-CD70ecd-TIM3ecd | heavy chain = SEQ ID NO: 670 |
| (cetuximab) | light chain = SEQ ID NO: 224 |
| anti-EGFR-GITRLecd | heavy chain = SEQ ID NO: 671 |
| (cetuximab) | light chain = SEQ ID NO: 43 |
| anti-EGFR-GITRLecd-BTLAecd | heavy chain = SEQ ID NO: 671 |
| (cetuximab) | light chain = SEQ ID NO: 226 |
| anti-EGFR-GITRLecd-PD1ecd | heavy chain = SEQ ID NO: 671 |
| (cetuximab) | light chain = SEQ ID NO: 221 |
| anti-EGFR-GITRLecd-SIGLEC10ecd | heavy chain = SEQ ID NO: 671 |
| (cetuximab) | light chain = SEQ ID NO: 222 |
| anti-EGFR-GITRLecd-SIRPaecd | heavy chain = SEQ ID NO: 671 |
| (cetuximab) | light chain = SEQ ID NO: 223 |
| anti-EGFR-GITRLecd-TIM3ecd | heavy chain = SEQ ID NO: 671 |
| (cetuximab) | light chain = SEQ ID NO: 224 |
| anti-EGFR-ICOSLecd | heavy chain = SEQ ID NO: 672 |
| (cetuximab) | light chain = SEQ ID NO: 43 |
| anti-EGFR-ICOSLecd-BTLAecd | heavy chain = SEQ ID NO: 672 |
| (cetuximab) | light chain = SEQ ID NO: 226 |
| anti-EGFR-ICOSLecd-PD1ecd | heavy chain = SEQ ID NO: 672 |
| (cetuximab) | light chain = SEQ ID NO: 221 |
| anti-EGFR-ICOSLecd-SIGLEC10ecd | heavy chain = SEQ ID NO: 672 |
| (cetuximab) | light chain = SEQ ID NO: 222 |
| anti-EGFR-ICOSLecd-SIRPaecd | heavy chain = SEQ ID NO: 672 |
| (cetuximab) | light chain = SEQ ID NO: 223 |
| anti-EGFR-ICOSLecd-TIM3ecd | heavy chain = SEQ ID NO: 672 |
| (cetuximab) | light chain = SEQ ID NO: 224 |
| anti-EGFR-IL12ecd | heavy chain = SEQ ID NO: 673 |
| (cetuximab) | light chain = SEQ ID NO: 43 |
| anti-EGFR-IL12ecd-BTLAecd | heavy chain = SEQ ID NO: 673 |
| (cetuximab) | light chain = SEQ ID NO: 226 |
| anti-EGFR-IL12ecd-PD1ecd | heavy chain = SEQ ID NO: 673 |
| (cetuximab) | light chain = SEQ ID NO: 221 |
| anti-EGFR-IL12ecd-SIGLEC10ecd | heavy chain = SEQ ID NO: 673 |
| (cetuximab) | light chain = SEQ ID NO: 222 |
| anti-EGFR-IL12ecd-SIRPaecd | heavy chain = SEQ ID NO: 673 |
| (cetuximab) | light chain = SEQ ID NO: 223 |
| anti-EGFR-IL12ecd-TIM3ecd | heavy chain = SEQ ID NO: 673 |
| (cetuximab) | light chain = SEQ ID NO: 224 |
| anti-EGFR-IL15ecd | heavy chain = SEQ ID NO: 674 |
| (cetuximab) | light chain = SEQ ID NO: 43 |
| anti-EGFR-IL15ecd-BTLAecd | heavy chain = SEQ ID NO: 674 |
| (cetuximab) | light chain = SEQ ID NO: 226 |
| anti-EGFR-IL15ecd-PD1ecd | heavy chain = SEQ ID NO: 674 |
| (cetuximab) | light chain = SEQ ID NO: 221 |
| anti-EGFR-IL15ecd-SIGLEC10ecd | heavy chain = SEQ ID NO: 674 |
| (cetuximab) | light chain = SEQ ID NO: 222 |
| anti-EGFR-IL15ecd-SIRPaecd | heavy chain = SEQ ID NO: 674 |
| (cetuximab) | light chain = SEQ ID NO: 223 |
| anti-EGFR-IL15ecd-TIM3ecd | heavy chain = SEQ ID NO: 674 |
| (cetuximab) | light chain = SEQ ID NO: 224 |
| anti-EGFR-LIGHTecd | heavy chain = SEQ ID NO: 675 |
| (cetuximab) | light chain = SEQ ID NO: 43 |
| anti-EGFR-LIGHTecd-BTLAecd | heavy chain = SEQ ID NO: 675 |
| (cetuximab) | light chain = SEQ ID NO: 226 |
| anti-EGFR-LIGHTecd-PD1ecd | heavy chain = SEQ ID NO: 675 |
| (cetuximab) | light chain = SEQ ID NO: 221 |
| anti-EGFR-LIGHTecd-SIGLEC10ecd | heavy chain = SEQ ID NO: 675 |
| (cetuximab) | light chain = SEQ ID NO: 222 |
| anti-EGFR-LIGHTecd-SIRPaecd | heavy chain = SEQ ID NO: 675 |
| (cetuximab) | light chain = SEQ ID NO: 223 |
| anti-EGFR-LIGHTecd-TIM3ecd | heavy chain = SEQ ID NO: 675 |
| (cetuximab) | light chain = SEQ ID NO: 224 |
| anti-EGFR-OX40Lecd | heavy chain = SEQ ID NO: 676 |
| (cetuximab) | light chain = SEQ ID NO: 43 |
| anti-EGFR-OX40Lecd-BTLAecd | heavy chain = SEQ ID NO: 676 |
| (cetuximab) | light chain = SEQ ID NO: 226 |
| anti-EGFR-OX40Lecd-PD1ecd | heavy chain = SEQ ID NO: 676 |
| (cetuximab) | light chain = SEQ ID NO: 221 |
| anti-EGFR-OX40Lecd-SIGLEC10ecd | heavy chain = SEQ ID NO: 676 |
| (cetuximab) | light chain = SEQ ID NO: 222 |
| anti-EGFR-OX40Lecd-SIRPaecd | heavy chain = SEQ ID NO: 676 |
| (cetuximab) | light chain = SEQ ID NO: 223 |
| anti-EGFR-OX40Lecd-TIM3ecd | heavy chain = SEQ ID NO: 676 |
| (cetuximab) | light chain = SEQ ID NO: 224 |
| anti-EGFR-BTLAecd-41BBLecd | heavy chain = SEQ ID NO: 220 |
| (cetuximab) | light chain = SEQ ID NO: 677 |
| anti-EGFR-BTLAecd-CD30Lecd | heavy chain = SEQ ID NO: 220 |
| (cetuximab) | light chain = SEQ ID NO: 678 |
| anti-EGFR-BTLAecd-CD40Lecd | heavy chain = SEQ ID NO: 220 |
| (cetuximab) | light chain = SEQ ID NO: 679 |
| anti-EGFR-BTLAecd-CD70ecd | heavy chain = SEQ ID NO: 220 |
| (cetuximab) | light chain = SEQ ID NO: 680 |
| anti-EGFR-BTLAecd-GITRLecd | heavy chain = SEQ ID NO: 220 |
| (cetuximab) | light chain = SEQ ID NO: 681 |
| anti-EGFR-BTLAecd-ICOSLecd | heavy chain = SEQ ID NO: 220 |
| (cetuximab) | light chain = SEQ ID NO: 682 |
| anti-EGFR-BTLAecd-IL12ecd | heavy chain = SEQ ID NO: 220 |
| (cetuximab) | light chain = SEQ ID NO: 683 |
| anti-EGFR-BTLAecd-IL15ecd | heavy chain = SEQ ID NO: 220 |
| (cetuximab) | light chain = SEQ ID NO: 684 |
| anti-EGFR-BTLAecd-LIGHTecd | heavy chain = SEQ ID NO: 220 |
| (cetuximab) | light chain = SEQ ID NO: 685 |
| anti-EGFR-BTLAecd-OX40Lecd | heavy chain = SEQ ID NO: 220 |
| (cetuximab) | light chain = SEQ ID NO: 686 |
| anti-EGFR-PD1ecd-41BBLecd | heavy chain = SEQ ID NO: 225 |
| (cetuximab) | light chain = SEQ ID NO: 677 |
| anti-EGFR-PD1ecd-CD30Lecd | heavy chain = SEQ ID NO: 225 |
| (cetuximab) | light chain = SEQ ID NO: 678 |
| anti-EGFR-PD1ecd-CD40Lecd | heavy chain = SEQ ID NO: 225 |
| (cetuximab) | light chain = SEQ ID NO: 679 |
| anti-EGFR-PD1ecd-CD70ecd | heavy chain = SEQ ID NO: 225 |
| (cetuximab) | light chain = SEQ ID NO: 680 |
| anti-EGFR-PD1ecd-GITRLecd | heavy chain = SEQ ID NO: 225 |
| (cetuximab) | light chain = SEQ ID NO: 681 |
| anti-EGFR-PD1ecd-ICOSLecd | heavy chain = SEQ ID NO: 225 |
| (cetuximab) | light chain = SEQ ID NO: 682 |
| anti-EGFR-PD1ecd-IL12ecd | heavy chain = SEQ ID NO: 225 |
| (cetuximab) | light chain = SEQ ID NO: 683 |
| anti-EGFR-PD1ecd-IL15ecd | heavy chain = SEQ ID NO: 225 |
| (cetuximab) | light chain = SEQ ID NO: 684 |
| anti-EGFR-PD1ecd-LIGHTecd | heavy chain = SEQ ID NO: 225 |
| (cetuximab) | light chain = SEQ ID NO: 685 |
| anti-EGFR-PD1ecd-OX40Lecd | heavy chain = SEQ ID NO: 225 |
| (cetuximab) | light chain = SEQ ID NO: 686 |
| anti-EGFR-SIGLEC10ecd-41BBLecd | heavy chain = SEQ ID NO: 227 |
| (cetuximab) | light chain = SEQ ID NO: 677 |
| anti-EGFR-SIGLEC10ecd-CD30Lecd | heavy chain = SEQ ID NO: 227 |
| (cetuximab) | light chain = SEQ ID NO: 678 |
| anti-EGFR-SIGLEC10ecd-CD40Lecd | heavy chain = SEQ ID NO: 227 |
| (cetuximab) | light chain = SEQ ID NO: 679 |
| anti-EGFR-SIGLEC10ecd-CD70ecd | heavy chain = SEQ ID NO: 227 |
| (cetuximab) | light chain = SEQ ID NO: 680 |
| anti-EGFR-SIGLEC10ecd-GITRLecd | heavy chain = SEQ ID NO: 227 |
| (cetuximab) | light chain = SEQ ID NO: 681 |
| anti-EGFR-SIGLEC10ecd-ICOSLecd | heavy chain = SEQ ID NO: 227 |
| (cetuximab) | light chain = SEQ ID NO: 682 |
| anti-EGFR-SIGLEC10ecd-IL12ecd | heavy chain = SEQ ID NO: 227 |
| (cetuximab) | light chain = SEQ ID NO: 683 |
| anti-EGFR-SIGLEC10ecd-IL15ecd | heavy chain = SEQ ID NO: 227 |
| (cetuximab) | light chain = SEQ ID NO: 684 |
| anti-EGFR-SIGLEC10ecd-LIGHTecd | heavy chain = SEQ ID NO: 227 |
| (cetuximab) | light chain = SEQ ID NO: 685 |
| anti-EGFR-SIGLEC10ecd-OX40Lecd | heavy chain = SEQ ID NO: 227 |
| (cetuximab) | light chain = SEQ ID NO: 686 |
| anti-EGFR-SIRPaecd-41BBLecd | heavy chain = SEQ ID NO: 228 |
| (cetuximab) | light chain = SEQ ID NO: 677 |
| anti-EGFR-SIRPaecd-CD30Lecd | heavy chain = SEQ ID NO: 228 |
| (cetuximab) | light chain = SEQ ID NO: 678 |
| anti-EGFR-SIRPaecd-CD40Lecd | heavy chain = SEQ ID NO: 228 |
| (cetuximab) | light chain = SEQ ID NO: 679 |
| anti-EGFR-SIRPaecd-CD70ecd | heavy chain = SEQ ID NO: 228 |
| (cetuximab) | light chain = SEQ ID NO: 680 |
| anti-EGFR-SIRPaecd-GITRLecd | heavy chain = SEQ ID NO: 228 |
| (cetuximab) | light chain = SEQ ID NO: 681 |
| anti-EGFR-SIRPaecd-ICOSLecd | heavy chain = SEQ ID NO: 228 |
| (cetuximab) | light chain = SEQ ID NO: 682 |
| anti-EGFR-SIRPaecd-IL12ecd | heavy chain = SEQ ID NO: 228 |
| (cetuximab) | light chain = SEQ ID NO: 683 |
| anti-EGFR-SIRPaecd-IL15ecd | heavy chain = SEQ ID NO: 228 |
| (cetuximab) | light chain = SEQ ID NO: 684 |
| anti-EGFR-SIRPaecd-LIGHTecd | heavy chain = SEQ ID NO: 228 |
| (cetuximab) | light chain = SEQ ID NO: 685 |
| anti-EGFR-SIRPaecd-OX40Lecd | heavy chain = SEQ ID NO: 228 |
| (cetuximab) | light chain = SEQ ID NO: 686 |
| anti-EGFR-TGFbRecd-41BBLecd | heavy chain = SEQ ID NO: 229 |
| (cetuximab) | light chain = SEQ ID NO: 677 |
| anti-EGFR-TGFbRecd-CD30Lecd | heavy chain = SEQ ID NO: 229 |
| (cetuximab) | light chain = SEQ ID NO: 678 |
| anti-EGFR-TGFbRecd-CD40Lecd | heavy chain = SEQ ID NO: 229 |
| (cetuximab) | light chain = SEQ ID NO: 679 |
| anti-EGFR-TGFbRecd-CD70ecd | heavy chain = SEQ ID NO: 229 |
| (cetuximab) | light chain = SEQ ID NO: 680 |
| anti-EGFR-TGFbRecd-GITRLecd | heavy chain = SEQ ID NO: 229 |
| (cetuximab) | light chain = SEQ ID NO: 681 |
| anti-EGFR-TGFbRecd-ICOSLecd | heavy chain = SEQ ID NO: 229 |
| (cetuximab) | light chain = SEQ ID NO: 682 |
| anti-EGFR-TGFbRecd-IL12ecd | heavy chain = SEQ ID NO: 229 |
| (cetuximab) | light chain = SEQ ID NO: 683 |
| anti-EGFR-TGFbRecd-IL15ecd | heavy chain = SEQ ID NO: 229 |
| (cetuximab) | light chain = SEQ ID NO: 684 |
| anti-EGFR-TGFbRecd-LIGHTecd | heavy chain = SEQ ID NO: 229 |
| (cetuximab) | light chain = SEQ ID NO: 685 |
| anti-EGFR-TGFbRecd-OX40Lecd | heavy chain = SEQ ID NO: 229 |
| (cetuximab) | light chain = SEQ ID NO: 686 |
| anti-EGFR-TIM3ecd-41BBLecd | heavy chain = SEQ ID NO: 230 |
| (cetuximab) | light chain = SEQ ID NO: 677 |
| anti-EGFR-TIM3ecd-CD30Lecd | heavy chain = SEQ ID NO: 230 |
| (cetuximab) | light chain = SEQ ID NO: 678 |
| anti-EGFR-TIM3ecd-CD40Lecd | heavy chain = SEQ ID NO: 230 |
| (cetuximab) | light chain = SEQ ID NO: 679 |
| anti-EGFR-TIM3ecd-CD70ecd | heavy chain = SEQ ID NO: 230 |
| (cetuximab) | light chain = SEQ ID NO: 680 |
| anti-EGFR-TIM3ecd-GITRLecd | heavy chain = SEQ ID NO: 230 |
| (cetuximab) | light chain = SEQ ID NO: 681 |
| anti-EGFR-TIM3ecd-ICOSLecd | heavy chain = SEQ ID NO: 230 |
| (cetuximab) | light chain = SEQ ID NO: 682 |
| anti-EGFR-TIM3ecd-IL12ecd | heavy chain = SEQ ID NO: 230 |
| (cetuximab) | light chain = SEQ ID NO: 683 |
| anti-EGFR-TIM3ecd-IL15ecd | heavy chain = SEQ ID NO: 230 |
| (cetuximab) | light chain = SEQ ID NO: 684 |
| anti-EGFR-TIM3ecd-LIGHTecd | heavy chain = SEQ ID NO: 230 |
| (cetuximab) | light chain = SEQ ID NO: 685 |
| anti-EGFR-TIM3ecd-OX40Lecd | heavy chain = SEQ ID NO: 230 |
| (cetuximab) | light chain = SEQ ID NO: 686 |
| anti-EGFR-VEGFRecd-41BBLecd | heavy chain = SEQ ID NO: 231 |
| (cetuximab) | light chain = SEQ ID NO: 677 |
| anti-EGFR-VEGFRecd-CD30Lecd | heavy chain = SEQ ID NO: 231 |
| (cetuximab) | light chain = SEQ ID NO: 678 |
| anti-EGFR-VEGFRecd-CD40Lecd | heavy chain = SEQ ID NO: 231 |
| (cetuximab) | light chain = SEQ ID NO: 679 |
| anti-EGFR-VEGFRecd-CD70ecd | heavy chain = SEQ ID NO: 231 |
| (cetuximab) | light chain = SEQ ID NO: 680 |
| anti-EGFR-VEGFRecd-GITRLecd | heavy chain = SEQ ID NO: 231 |
| (cetuximab) | light chain = SEQ ID NO: 681 |
| anti-EGFR-VEGFRecd-ICOSLecd | heavy chain = SEQ ID NO: 231 |
| (cetuximab) | light chain = SEQ ID NO: 682 |
| anti-EGFR-VEGFRecd-IL12ecd | heavy chain = SEQ ID NO: 231 |
| (cetuximab) | light chain = SEQ ID NO: 683 |
| anti-EGFR-VEGFRecd-IL15ecd | heavy chain = SEQ ID NO: 231 |
| (cetuximab) | light chain = SEQ ID NO: 684 |
| anti-EGFR-VEGFRecd-LIGHTecd | heavy chain = SEQ ID NO: 231 |
| (cetuximab) | light chain = SEQ ID NO: 685 |
| anti-EGFR-VEGFRecd-OX40Lecd | heavy chain = SEQ ID NO: 231 |
| (cetuximab) | light chain = SEQ ID NO: 686 |
| anti-IL17R-41BBLecd | heavy chain = SEQ ID NO: 687 |
| (brodalumab) | light chain = SEQ ID NO: 63 |
| anti-IL17R-41BBLecd-BTLAecd | heavy chain = SEQ ID NO: 687 |
| (brodalumab) | light chain = SEQ ID NO: 331 |
| anti-IL17R-41BBLecd-PD1ecd | heavy chain = SEQ ID NO: 687 |
| (brodalumab) | light chain = SEQ ID NO: 326 |
| anti-IL17R-41BBLecd-SIGLEC10ecd | heavy chain = SEQ ID NO: 687 |
| (brodalumab) | light chain = SEQ ID NO: 327 |
| anti-IL17R-41BBLecd-SIRPaecd | heavy chain = SEQ ID NO: 687 |
| (brodalumab) | light chain = SEQ ID NO: 328 |
| anti-IL17R-41BBLecd-TIM3ecd | heavy chain = SEQ ID NO: 687 |
| (brodalumab) | light chain = SEQ ID NO: 329 |
| anti-IL17R-CD30Lecd | heavy chain = SEQ ID NO: 688 |
| (brodalumab) | light chain = SEQ ID NO: 63 |
| anti-IL17R-CD30Lecd-BTLAecd | heavy chain = SEQ ID NO: 688 |
| (brodalumab) | light chain = SEQ ID NO: 331 |
| anti-IL17R-CD30Lecd-PD1ecd | heavy chain = SEQ ID NO: 688 |
| (brodalumab) | light chain = SEQ ID NO: 326 |
| anti-IL17R-CD30Lecd-SIGLEC10ecd | heavy chain = SEQ ID NO: 688 |
| (brodalumab) | light chain = SEQ ID NO: 327 |
| anti-IL17R-CD30Lecd-SIRPaecd | heavy chain = SEQ ID NO: 688 |
| (brodalumab) | light chain = SEQ ID NO: 328 |
| anti-IL17R-CD30Lecd-TIM3ecd | heavy chain = SEQ ID NO: 688 |
| (brodalumab) | light chain = SEQ ID NO: 329 |
| anti-IL17R-CD40Lecd | heavy chain = SEQ ID NO: 689 |
| (brodalumab) | light chain = SEQ ID NO: 63 |
| anti-IL17R-CD40Lecd-BTLAecd | heavy chain = SEQ ID NO: 689 |
| (brodalumab) | light chain = SEQ ID NO: 331 |
| anti-IL17R-CD40Lecd-PD1ecd | heavy chain = SEQ ID NO: 689 |
| (brodalumab) | light chain = SEQ ID NO: 326 |
| anti-IL17R-CD40Lecd-SIGLEC10ecd | heavy chain = SEQ ID NO: 689 |
| (brodalumab) | light chain = SEQ ID NO: 327 |
| anti-IL17R-CD40Lecd-SIRPaecd | heavy chain = SEQ ID NO: 689 |
| (brodalumab) | light chain = SEQ ID NO: 328 |
| anti-IL17R-CD40Lecd-TIM3ecd | heavy chain = SEQ ID NO: 689 |
| (brodalumab) | light chain = SEQ ID NO: 329 |
| anti-IL17R-CD70ecd | heavy chain = SEQ ID NO: 690 |
| (brodalumab) | light chain = SEQ ID NO: 63 |
| anti-IL17R-CD70ecd-BTLAecd | heavy chain = SEQ ID NO: 690 |
| (brodalumab) | light chain = SEQ ID NO: 331 |
| anti-IL17R-CD70ecd-PD1ecd | heavy chain = SEQ ID NO: 690 |
| (brodalumab | light chain = SEQ ID NO: 326 |
| anti-IL17R-CD70ecd-SIGLEC10ecd | heavy chain = SEQ ID NO: 690 |
| (brodalumab) | light chain = SEQ ID NO: 327 |
| anti-IL17R-CD70ecd-SIRPaecd | heavy chain = SEQ ID NO: 690 |
| (brodalumab) | light chain = SEQ ID NO: 328 |
| anti-IL17R-CD70ecd-TIM3ecd | heavy chain = SEQ ID NO: 690 |
| (brodalumab) | light chain = SEQ ID NO: 329 |
| anti-IL17R-GITRLecd | heavy chain = SEQ ID NO: 691 |
| (brodalumab) | light chain = SEQ ID NO: 63 |
| anti-IL17R-GITRLecd-BTLAecd | heavy chain = SEQ ID NO: 691 |
| (brodalumab) | light chain = SEQ ID NO: 331 |
| anti-IL17R-GITRLecd-PD1ecd | heavy chain = SEQ ID NO: 691 |
| (brodalumab) | light chain = SEQ ID NO: 326 |
| anti-IL17R-GITRLecd-SIGLEC10ecd | heavy chain = SEQ ID NO: 691 |
| (brodalumab) | light chain = SEQ ID NO: 327 |
| anti-IL17R-GITRLecd-SIRPaecd | heavy chain = SEQ ID NO: 691 |
| (brodalumab) | light chain = SEQ ID NO: 328 |
| anti-IL17R-GITRLecd-TIM3ecd | heavy chain = SEQ ID NO: 691 |
| (brodalumab) | light chain = SEQ ID NO: 329 |
| anti-IL17R-ICOSLecd | heavy chain = SEQ ID NO: 692 |
| (brodalumab) | light chain = SEQ ID NO: 63 |
| anti-IL17R-ICOSLecd-BTLAecd | heavy chain = SEQ ID NO: 692 |
| (brodalumab) | light chain = SEQ ID NO: 331 |
| anti-IL17R-ICOSLecd-PD1ecd | heavy chain = SEQ ID NO: 692 |
| (brodalumab) | light chain = SEQ ID NO: 326 |
| anti-IL17R-ICOSLecd-SIGLEC10ecd | heavy chain = SEQ ID NO: 692 |
| (brodalumab) | light chain = SEQ ID NO: 327 |
| anti-IL17R-ICOSLecd-SIRPaecd | heavy chain = SEQ ID NO: 692 |
| (brodalumab) | light chain = SEQ ID NO: 328 |
| anti-IL17R-ICOSLecd-TIM3ecd | heavy chain = SEQ ID NO: 692 |
| (brodalumab) | light chain = SEQ ID NO: 329 |
| anti-IL17R-IL12ecd | heavy chain = SEQ ID NO: 693 |
| (brodalumab) | light chain = SEQ ID NO: 63 |
| anti-IL17R-IL12ecd-BTLAecd | heavy chain = SEQ ID NO: 693 |
| (brodalumab) | light chain = SEQ ID NO: 331 |
| anti-IL17R-IL12ecd-PD1ecd | heavy chain = SEQ ID NO: 693 |
| (brodalumab) | light chain = SEQ ID NO: 326 |
| anti-IL17R-IL12ecd-SIGLEC10ecd | heavy chain = SEQ ID NO: 693 |
| (brodalumab) | light chain = SEQ ID NO: 327 |
| anti-IL17R-IL12ecd-SIRPaecd | heavy chain = SEQ ID NO: 693 |
| (brodalumab) | light chain = SEQ ID NO: 328 |
| anti-IL17R-IL12ecd-TIM3ecd | heavy chain = SEQ ID NO: 693 |
| (brodalumab) | light chain = SEQ ID NO: 329 |
| anti-IL17R-IL15ecd | heavy chain = SEQ ID NO: 694 |
| (brodalumab) | light chain = SEQ ID NO: 63 |
| anti-IL17R-IL15ecd-BTLAecd | heavy chain = SEQ ID NO: 694 |
| (brodalumab) | light chain = SEQ ID NO: 331 |
| anti-IL17R-IL15ecd-PD1ecd | heavy chain = SEQ ID NO: 694 |
| (brodalumab) | light chain = SEQ ID NO: 326 |
| anti-IL17R-IL15ecd-SIGLEC10ecd | heavy chain = SEQ ID NO: 694 |
| (brodalumab) | light chain = SEQ ID NO: 327 |
| anti-IL17R-IL15ecd-SIRPaecd | heavy chain = SEQ ID NO: 694 |
| (brodalumab) | light chain = SEQ ID NO: 328 |
| anti-IL17R-IL15ecd-TIM3ecd | heavy chain = SEQ ID NO: 694 |
| (brodalumab) | light chain = SEQ ID NO: 329 |
| anti-IL17R-LIGHTecd | heavy chain = SEQ ID NO: 695 |
| (brodalumab) | light chain = SEQ ID NO: 63 |
| anti-IL17R-LIGHTecd-BTLAecd | heavy chain = SEQ ID NO: 695 |
| (brodalumab) | light chain = SEQ ID NO: 331 |
| anti-IL17R-LIGHTecd-PD1ecd | heavy chain = SEQ ID NO: 695 |
| (brodalumab) | light chain = SEQ ID NO: 326 |
| anti-IL17R-LIGHTecd-SIGLEC10ecd | heavy chain = SEQ ID NO: 695 |
| (brodalumab) | light chain = SEQ ID NO: 327 |
| anti-IL17R-LIGHTecd-SIRPaecd | heavy chain = SEQ ID NO: 695 |
| (brodalumab) | light chain = SEQ ID NO: 328 |
| anti-IL17R-LIGHTecd-TIM3ecd | heavy chain = SEQ ID NO: 695 |
| (brodalumab) | light chain = SEQ ID NO: 329 |
| anti-IL17R-OX40Lecd | heavy chain = SEQ ID NO: 696 |
| (brodalumab) | light chain = SEQ ID NO: 63 |
| anti-IL17R-OX40Lecd-BTLAecd | heavy chain = SEQ ID NO: 696 |
| (brodalumab) | light chain = SEQ ID NO: 331 |
| anti-IL17R-OX40Lecd-PD1ecd | heavy chain = SEQ ID NO: 696 |
| (brodalumab) | light chain = SEQ ID NO: 326 |
| anti-IL17R-OX40Lecd-SIGLEC10ecd | heavy chain = SEQ ID NO: 696 |
| (brodalumab) | light chain = SEQ ID NO: 327 |
| anti-IL17R-OX40Lecd-SIRPaecd | heavy chain = SEQ ID NO: 696 |
| (brodalumab) | light chain = SEQ ID NO: 328 |
| anti-IL17R-OX40Lecd-TIM3ecd | heavy chain = SEQ ID NO: 696 |
| (brodalumab) | light chain = SEQ ID NO: 329 |
| anti-IL17R-BTLAecd-41BBLecd | heavy chain = SEQ ID NO: 325 |
| (brodalumab) | light chain = SEQ ID NO: 697 |
| anti-IL17R-BTLAecd-CD30Lecd | heavy chain = SEQ ID NO: 325 |
| (brodalumab) | light chain = SEQ ID NO: 698 |
| anti-IL17R-BTLAecd-CD40Lecd | heavy chain = SEQ ID NO: 325 |
| (brodalumab) | light chain = SEQ ID NO: 699 |
| anti-IL17R-BTLAecd-CD70ecd | heavy chain = SEQ ID NO: 325 |
| (brodalumab) | light chain = SEQ ID NO: 700 |
| anti-IL17R-BTLAecd-GITRLecd | heavy chain = SEQ ID NO: 325 |
| (brodalumab) | light chain = SEQ ID NO: 701 |
| anti-IL17R-BTLAecd-ICOSLecd | heavy chain = SEQ ID NO: 325 |
| (brodalumab) | light chain = SEQ ID NO: 702 |
| anti-IL17R-BTLAecd-IL12ecd | heavy chain = SEQ ID NO: 325 |
| (brodalumab) | light chain = SEQ ID NO: 703 |
| anti-IL17R-BTLAecd-IL15ecd | heavy chain = SEQ ID NO: 325 |
| (brodalumab) | light chain = SEQ ID NO: 704 |
| anti-IL17R-BTLAecd-LIGHTecd | heavy chain = SEQ ID NO: 325 |
| (brodalumab) | light chain = SEQ ID NO: 705 |
| anti-IL17R-BTLAecd-OX40Lecd | heavy chain = SEQ ID NO: 325 |
| (brodalumab) | light chain = SEQ ID NO: 706 |
| anti-IL17R-PD1ecd-41BBLecd | heavy chain = SEQ ID NO: 330 |
| (brodalumab) | light chain = SEQ ID NO: 697 |
| anti-IL17R-PD1ecd-CD30Lecd | heavy chain = SEQ ID NO: 330 |
| (brodalumab) | light chain = SEQ ID NO: 698 |
| anti-IL17R-PD1ecd-CD40Lecd | heavy chain = SEQ ID NO: 330 |
| (brodalumab) | light chain = SEQ ID NO: 699 |
| anti-IL17R-PD1ecd-CD70ecd | heavy chain = SEQ ID NO: 330 |
| (brodalumab) | light chain = SEQ ID NO: 700 |
| anti-IL17R-PD1ecd-GITRLecd | heavy chain = SEQ ID NO: 330 |
| (brodalumab) | light chain = SEQ ID NO: 701 |
| anti-IL17R-PD1ecd-ICOSLecd | heavy chain = SEQ ID NO: 330 |
| (brodalumab) | light chain = SEQ ID NO: 702 |
| anti-IL17R-PD1ecd-IL12ecd | heavy chain = SEQ ID NO: 330 |
| (brodalumab) | light chain = SEQ ID NO: 703 |
| anti-IL17R-PD1ecd-IL15ecd | heavy chain = SEQ ID NO: 330 |
| (brodalumab) | light chain = SEQ ID NO: 704 |
| anti-IL17R-PD1ecd-LIGHTecd | heavy chain = SEQ ID NO: 330 |
| (brodalumab) | light chain = SEQ ID NO: 705 |
| anti-IL17R-PD1ecd-OX40Lecd | heavy chain = SEQ ID NO: 330 |
| (brodalumab) | light chain = SEQ ID NO: 706 |
| anti-IL17R-SIGLEC10ecd-41BBLecd | heavy chain = SEQ ID NO: 332 |
| (brodalumab) | light chain = SEQ ID NO: 697 |
| anti-IL17R-SIGLEC10ecd-CD30Lecd | heavy chain = SEQ ID NO: 332 |
| (brodalumab) | light chain = SEQ ID NO: 698 |
| anti-IL17R-SIGLEC10ecd-CD40Lecd | heavy chain = SEQ ID NO: 332 |
| (brodalumab) | light chain = SEQ ID NO: 699 |
| anti-IL17R-SIGLEC10ecd-CD70ecd | heavy chain = SEQ ID NO: 332 |
| (brodalumab) | light chain = SEQ ID NO: 700 |
| anti-IL17R-SIGLEC10ecd-GITRLecd | heavy chain = SEQ ID NO: 332 |
| (brodalumab) | light chain = SEQ ID NO: 701 |
| anti-IL17R-SIGLEC10ecd-ICOSLecd | heavy chain = SEQ ID NO: 332 |
| (brodalumab) | light chain = SEQ ID NO: 702 |
| anti-IL17R-SIGLEC10ecd-IL12ecd | heavy chain = SEQ ID NO: 332 |
| (brodalumab) | light chain = SEQ ID NO: 703 |
| anti-IL17R-SIGLEC10ecd-IL15ecd | heavy chain = SEQ ID NO: 332 |
| (brodalumab) | light chain = SEQ ID NO: 704 |
| anti-IL17R-SIGLEC10ecd-LIGHTecd | heavy chain = SEQ ID NO: 332 |
| (brodalumab) | light chain = SEQ ID NO: 705 |
| anti-IL17R-SIGLEC10ecd-OX40Lecd | heavy chain = SEQ ID NO: 332 |
| (brodalumab) | light chain = SEQ ID NO: 706 |
| anti-IL17R-SIRPaecd-41BBLecd | heavy chain = SEQ ID NO: 333 |
| (brodalumab) | light chain = SEQ ID NO: 697 |
| anti-IL17R-SIRPaecd-CD30Lecd | heavy chain = SEQ ID NO: 333 |
| (brodalumab) | light chain = SEQ ID NO: 698 |
| anti-IL17R-SIRPaecd-CD40Lecd | heavy chain = SEQ ID NO: 333 |
| (brodalumab) | light chain = SEQ ID NO: 699 |
| anti-IL17R-SIRPaecd-CD70ecd | heavy chain = SEQ ID NO: 333 |
| (brodalumab) | light chain = SEQ ID NO: 700 |
| anti-IL17R-SIRPaecd-GITRLecd | heavy chain = SEQ ID NO: 333 |
| (brodalumab) | light chain = SEQ ID NO: 701 |
| anti-IL17R-SIRPaecd-ICOSLecd | heavy chain = SEQ ID NO: 333 |
| (brodalumab) | light chain = SEQ ID NO: 702 |
| anti-IL17R-SIRPaecd-IL12ecd | heavy chain = SEQ ID NO: 333 |
| (brodalumab) | light chain = SEQ ID NO: 703 |
| anti-IL17R-SIRPaecd-IL15ecd | heavy chain = SEQ ID NO: 333 |
| (brodalumab) | light chain = SEQ ID NO: 704 |
| anti-IL17R-SIRPaecd-LIGHTecd | heavy chain = SEQ ID NO: 333 |
| (brodalumab) | light chain = SEQ ID NO: 705 |
| anti-IL17R-SIRPaecd-OX40Lecd | heavy chain = SEQ ID NO: 333 |
| (brodalumab) | light chain = SEQ ID NO: 706 |
| anti-IL17R-TGFbRecd-41BBLecd | heavy chain = SEQ ID NO: 334 |
| (brodalumab) | light chain = SEQ ID NO: 697 |
| anti-IL17R-TGFbRecd-CD30Lecd | heavy chain = SEQ ID NO: 334 |
| (brodalumab) | light chain = SEQ ID NO: 698 |
| anti-IL17R-TGFbRecd-CD40Lecd | heavy chain = SEQ ID NO: 334 |
| (brodalumab) | light chain = SEQ ID NO: 699 |
| anti-IL17R-TGFbRecd-CD70ecd | heavy chain = SEQ ID NO: 334 |
| (brodalumab) | light chain = SEQ ID NO: 700 |
| anti-IL17R-TGFbRecd-GITRLecd | heavy chain = SEQ ID NO: 334 |
| (brodalumab) | light chain = SEQ ID NO: 701 |
| anti-IL17R-TGFbRecd-ICOSLecd | heavy chain = SEQ ID NO: 334 |
| (brodalumab) | light chain = SEQ ID NO: 702 |
| anti-IL17R-TGFbRecd-IL12ecd | heavy chain = SEQ ID NO: 334 |
| (brodalumab) | light chain = SEQ ID NO: 703 |
| anti-IL17R-TGFbRecd-IL15ecd | heavy chain = SEQ ID NO: 334 |
| (brodalumab) | light chain = SEQ ID NO: 704 |
| anti-IL17R-TGFbRecd-LIGHTecd | heavy chain = SEQ ID NO: 334 |
| (brodalumab) | light chain = SEQ ID NO: 705 |
| anti-IL17R-TGFbRecd-OX40Lecd | heavy chain = SEQ ID NO: 334 |
| (brodalumab) | light chain = SEQ ID NO: 706 |
| anti-IL17R-TIM3ecd-41BBLecd | heavy chain = SEQ ID NO: 335 |
| (brodalumab) | light chain = SEQ ID NO: 697 |
| anti-IL17R-TIM3ecd-CD30Lecd | heavy chain = SEQ ID NO: 335 |
| (brodalumab) | light chain = SEQ ID NO: 698 |
| anti-IL17R-TIM3ecd-CD40Lecd | heavy chain = SEQ ID NO: 335 |
| (brodalumab) | light chain = SEQ ID NO: 699 |
| anti-IL17R-TIM3ecd-CD70ecd | heavy chain = SEQ ID NO: 335 |
| (brodalumab) | light chain = SEQ ID NO: 700 |
| anti-IL17R-TIM3ecd-GITRLecd | heavy chain = SEQ ID NO: 335 |
| (brodalumab) | light chain = SEQ ID NO: 701 |
| anti-IL17R-TIM3ecd-ICOSLecd | heavy chain = SEQ ID NO: 335 |
| (brodalumab) | light chain = SEQ ID NO: 702 |
| anti-IL17R-TIM3ecd-IL12ecd | heavy chain = SEQ ID NO: 335 |
| (brodalumab) | light chain = SEQ ID NO: 703 |
| anti-IL17R-TIM3ecd-IL15ecd | heavy chain = SEQ ID NO: 335 |
| (brodalumab) | light chain = SEQ ID NO: 704 |
| anti-IL17R-TIM3ecd-LIGHTecd | heavy chain = SEQ ID NO: 335 |
| (brodalumab) | light chain = SEQ ID NO: 705 |
| anti-IL17R-TIM3ecd-OX40Lecd | heavy chain = SEQ ID NO: 335 |
| (brodalumab) | light chain = SEQ ID NO: 706 |
| anti-IL17R-VEGFRecd-41BBLecd | heavy chain = SEQ ID NO: 336 |
| (brodalumab) | light chain = SEQ ID NO: 697 |
| anti-IL17R-VEGFRecd-CD30Lecd | heavy chain = SEQ ID NO: 336 |
| (brodalumab) | light chain = SEQ ID NO: 698 |
| anti-IL17R-VEGFRecd-CD40Lecd | heavy chain = SEQ ID NO: 336 |
| (brodalumab) | light chain = SEQ ID NO: 699 |
| anti-IL17R-VEGFRecd-CD70ecd | heavy chain = SEQ ID NO: 336 |
| (brodalumab) | light chain = SEQ ID NO: 700 |
| anti-IL17R-VEGFRecd-GITRLecd | heavy chain = SEQ ID NO: 336 |
| (brodalumab) | light chain = SEQ ID NO: 701 |
| anti-IL17R-VEGFRecd-ICOSLecd | heavy chain = SEQ ID NO: 336 |
| (brodalumab) | light chain = SEQ ID NO: 702 |
| anti-IL17R-VEGFRecd-IL12ecd | heavy chain = SEQ ID NO: 336 |
| (brodalumab) | light chain = SEQ ID NO: 703 |
| anti-IL17R-VEGFRecd-IL15ecd | heavy chain = SEQ ID NO: 336 |
| (brodalumab) | light chain = SEQ ID NO: 704 |
| anti-IL17R-VEGFRecd-LIGHTecd | heavy chain = SEQ ID NO: 336 |
| (brodalumab) | light chain = SEQ ID NO: 705 |
| anti-IL17R-VEGFRecd-OX40Lecd | heavy chain = SEQ ID NO: 336 |
| (brodalumab) | light chain = SEQ ID NO: 706 |
| anti-VEGF-41BBLecd | heavy chain = SEQ ID NO: 707 |
| (bevacizumab) | light chain = SEQ ID NO: 32 |
| anti-VEGF-41BBLecd-BTLAecd | heavy chain = SEQ ID NO: 707 |
| (bevacizumab) | light chain = SEQ ID NO: 367 |
| anti-VEGF-41BBLecd-PD1ecd | heavy chain = SEQ ID NO: 707 |
| (bevacizumab) | light chain = SEQ ID NO: 362 |
| anti-VEGF-41BBLecd-SIGLEC10ecd | heavy chain = SEQ ID NO: 707 |
| (bevacizumab) | light chain = SEQ ID NO: 363 |
| anti-VEGF-41BBLecd-SIRPaecd | heavy chain = SEQ ID NO: 707 |
| (bevacizumab) | light chain = SEQ ID NO: 364 |
| anti-VEGF-41BBLecd-TIM3ecd | heavy chain = SEQ ID NO: 707 |
| (bevacizumab) | light chain = SEQ ID NO: 365 |
| anti-VEGF-CD30Lecd | heavy chain = SEQ ID NO: 708 |
| (bevacizumab) | light chain = SEQ ID NO: 32 |
| anti-VEGF-CD30Lecd-BTLAecd | heavy chain = SEQ ID NO: 708 |
| (bevacizumab) | light chain = SEQ ID NO: 367 |
| anti-VEGF-CD30Lecd-PD1ecd | heavy chain = SEQ ID NO: 708 |
| (bevacizumab) | light chain = SEQ ID NO: 362 |
| anti-VEGF-CD30Lecd-SIGLEC10ecd | heavy chain = SEQ ID NO: 708 |
| (bevacizumab) | light chain = SEQ ID NO: 363 |
| anti-VEGF-CD30Lecd-SIRPaecd | heavy chain = SEQ ID NO: 708 |
| (bevacizumab) | light chain = SEQ ID NO: 364 |
| anti-VEGF-CD30Lecd-TIM3ecd | heavy chain = SEQ ID NO: 708 |
| (bevacizumab) | light chain = SEQ ID NO: 365 |
| anti-VEGF-CD40Lecd | heavy chain = SEQ ID NO: 709 |
| (bevacizumab) | light chain = SEQ ID NO: 32 |
| anti-VEGF-CD40Lecd-BTLAecd | heavy chain = SEQ ID NO: 709 |
| (bevacizumab) | light chain = SEQ ID NO: 367 |
| anti-VEGF-CD40Lecd-PD1ecd | heavy chain = SEQ ID NO: 709 |
| (bevacizumab) | light chain = SEQ ID NO: 362 |
| anti-VEGF-CD40Lecd-SIGLEC10ecd | heavy chain = SEQ ID NO: 709 |
| (bevacizumab) | light chain = SEQ ID NO: 363 |
| anti-VEGF-CD40Lecd-SIRPaecd | heavy chain = SEQ ID NO: 709 |
| (bevacizumab) | light chain = SEQ ID NO: 364 |
| anti-VEGF-CD40Lecd-TIM3ecd | heavy chain = SEQ ID NO: 709 |
| (bevacizumab) | light chain = SEQ ID NO: 365 |
| anti-VEGF-CD70ecd | heavy chain = SEQ ID NO: 710 |
| (bevacizumab) | light chain = SEQ ID NO: 32 |
| anti-VEGF-CD70ecd-BTLAecd | heavy chain = SEQ ID NO: 710 |
| (bevacizumab) | light chain = SEQ ID NO: 367 |
| anti-VEGF-CD70ecd-PD1ecd | heavy chain = SEQ ID NO: 710 |
| (bevacizumab) | light chain = SEQ ID NO: 362 |
| anti-VEGF-CD70ecd-SIGLEC10ecd | heavy chain = SEQ ID NO: 710 |
| (bevacizumab) | light chain = SEQ ID NO: 363 |
| anti-VEGF-CD70ecd-SIRPaecd | heavy chain = SEQ ID NO: 710 |
| (bevacizumab) | light chain = SEQ ID NO: 364 |
| anti-VEGF-CD70ecd-TIM3ecd | heavy chain = SEQ ID NO: 710 |
| (bevacizumab) | light chain = SEQ ID NO: 365 |
| anti-VEGF-GITRLecd | heavy chain = SEQ ID NO: 711 |
| (bevacizumab) | light chain = SEQ ID NO: 32 |
| anti-VEGF-GITRLecd-BTLAecd | heavy chain = SEQ ID NO: 711 |
| (bevacizumab) | light chain = SEQ ID NO: 367 |
| anti-VEGF-GITRLecd-PD1ecd | heavy chain = SEQ ID NO: 711 |
| (bevacizumab) | light chain = SEQ ID NO: 362 |
| anti-VEGF-GITRLecd-SIGLEC10ecd | heavy chain = SEQ ID NO: 711 |
| (bevacizumab) | light chain = SEQ ID NO: 363 |
| anti-VEGF-GITRLecd-SIRPaecd | heavy chain = SEQ ID NO: 711 |
| (bevacizumab) | light chain = SEQ ID NO: 364 |
| anti-VEGF-GITRLecd-TIM3ecd | heavy chain = SEQ ID NO: 711 |
| (bevacizumab) | light chain = SEQ ID NO: 365 |
| anti-VEGF-ICOSLecd | heavy chain = SEQ ID NO: 712 |
| (bevacizumab) | light chain = SEQ ID NO: 32 |
| anti-VEGF-ICOSLecd-BTLAecd | heavy chain = SEQ ID NO: 712 |
| (bevacizumab) | light chain = SEQ ID NO: 367 |
| anti-VEGF-ICOSLecd-PD1ecd | heavy chain = SEQ ID NO: 712 |
| (bevacizumab) | light chain = SEQ ID NO: 362 |
| anti-VEGF-ICOSLecd-SIGLEC10ecd | heavy chain = SEQ ID NO: 712 |
| (bevacizumab) | light chain = SEQ ID NO: 363 |
| anti-VEGF-ICOSLecd-SIRPaecd | heavy chain = SEQ ID NO: 712 |
| (bevacizumab) | light chain = SEQ ID NO: 364 |
| anti-VEGF-ICOSLecd-TIM3ecd | heavy chain = SEQ ID NO: 712 |
| (bevacizumab) | light chain = SEQ ID NO: 365 |
| anti-VEGF-IL12ecd | heavy chain = SEQ ID NO: 713 |
| (bevacizumab) | light chain = SEQ ID NO: 32 |
| anti-VEGF-IL12ecd-BTLAecd | heavy chain = SEQ ID NO: 713 |
| (bevacizumab) | light chain = SEQ ID NO: 367 |
| anti-VEGF-IL12ecd-PD1ecd | heavy chain = SEQ ID NO: 713 |
| (bevacizumab) | light chain = SEQ ID NO: 362 |
| anti-VEGF-IL12ecd-SIGLEC10ecd | heavy chain = SEQ ID NO: 713 |
| (bevacizumab) | light chain = SEQ ID NO: 363 |
| anti-VEGF-IL12ecd-SIRPaecd | heavy chain = SEQ ID NO: 713 |
| (bevacizumab) | light chain = SEQ ID NO: 364 |
| anti-VEGF-IL12ecd-TIM3ecd | heavy chain = SEQ ID NO: 713 |
| (bevacizumab) | light chain = SEQ ID NO: 365 |
| anti-VEGF-IL15ecd | heavy chain = SEQ ID NO: 714 |
| (bevacizumab) | light chain = SEQ ID NO: 32 |
| anti-VEGF-IL15ecd-BTLAecd | heavy chain = SEQ ID NO: 714 |
| (bevacizumab) | light chain = SEQ ID NO: 367 |
| anti-VEGF-IL15ecd-PD1ecd | heavy chain = SEQ ID NO: 714 |
| (bevacizumab) | light chain = SEQ ID NO: 362 |
| anti-VEGF-IL15ecd-SIGLEC10ecd | heavy chain = SEQ ID NO: 714 |
| (bevacizumab) | light chain = SEQ ID NO: 363 |
| anti-VEGF-IL15ecd-SIRPaecd | heavy chain = SEQ ID NO: 714 |
| (bevacizumab) | light chain = SEQ ID NO: 364 |
| anti-VEGF-IL15ecd-TIM3ecd | heavy chain = SEQ ID NO: 714 |
| (bevacizumab) | light chain = SEQ ID NO: 365 |
| anti-VEGF-LIGHTecd | heavy chain = SEQ ID NO: 715 |
| (bevacizumab) | light chain = SEQ ID NO: 32 |
| anti-VEGF-LIGHTecd-BTLAecd | heavy chain = SEQ ID NO: 715 |
| (bevacizumab) | light chain = SEQ ID NO: 367 |
| anti-VEGF-LIGHTecd-PD1ecd | heavy chain = SEQ ID NO: 715 |
| (bevacizumab) | light chain = SEQ ID NO: 362 |
| anti-VEGF-LIGHTecd-SIGLEC10ecd | heavy chain = SEQ ID NO: 715 |
| (bevacizumab) | light chain = SEQ ID NO: 363 |
| anti-VEGF-LIGHTecd-SIRPaecd | heavy chain = SEQ ID NO: 715 |
| (bevacizumab) | light chain = SEQ ID NO: 364 |
| anti-VEGF-LIGHTecd-TIM3ecd | heavy chain = SEQ ID NO: 715 |
| (bevacizumab) | light chain = SEQ ID NO: 365 |
| anti-VEGF-OX40Lecd | heavy chain = SEQ ID NO: 716 |
| (bevacizumab) | light chain = SEQ ID NO: 32 |
| anti-VEGF-OX40Lecd-BTLAecd | heavy chain = SEQ ID NO: 716 |
| (bevacizumab) | light chain = SEQ ID NO: 367 |
| anti-VEGF-OX40Lecd-PD1ecd | heavy chain = SEQ ID NO: 716 |
| (bevacizumab) | light chain = SEQ ID NO: 362 |
| anti-VEGF-OX40Lecd-SIGLEC10ecd | heavy chain = SEQ ID NO: 716 |
| (bevacizumab) | light chain = SEQ ID NO: 363 |
| anti-VEGF-OX40Lecd-SIRPaecd | heavy chain = SEQ ID NO: 716 |
| (bevacizumab) | light chain = SEQ ID NO: 364 |
| anti-VEGF-OX40Lecd-TIM3ecd | heavy chain = SEQ ID NO: 716 |
| (bevacizumab) | light chain = SEQ ID NO: 365 |
| anti-VEGF-BTLAecd-41BBLecd | heavy chain = SEQ ID NO: 361 |
| (bevacizumab) | light chain = SEQ ID NO: 717 |
| anti-VEGF-BTLAecd-CD30Lecd | heavy chain = SEQ ID NO: 361 |
| (bevacizumab) | light chain = SEQ ID NO: 718 |
| anti-VEGF-BTLAecd-CD40Lecd | heavy chain = SEQ ID NO: 361 |
| (bevacizumab) | light chain = SEQ ID NO: 719 |
| anti-VEGF-BTLAecd-CD70ecd | heavy chain = SEQ ID NO: 361 |
| (bevacizumab) | light chain = SEQ ID NO: 720 |
| anti-VEGF-BTLAecd-GITRLecd | heavy chain = SEQ ID NO: 361 |
| (bevacizumab) | light chain = SEQ ID NO: 721 |
| anti-VEGF-BTLAecd-ICOSLecd | heavy chain = SEQ ID NO: 361 |
| (bevacizumab) | light chain = SEQ ID NO: 722 |
| anti-VEGF-BTLAecd-IL12ecd | heavy chain = SEQ ID NO: 361 |
| (bevacizumab) | light chain = SEQ ID NO: 723 |
| anti-VEGF-BTLAecd-IL15ecd | heavy chain = SEQ ID NO: 361 |
| (bevacizumab) | light chain = SEQ ID NO: 724 |
| anti-VEGF-BTLAecd-LIGHTecd | heavy chain = SEQ ID NO: 361 |
| (bevacizumab) | light chain = SEQ ID NO: 725 |
| anti-VEGF-BTLAecd-OX40Lecd | heavy chain = SEQ ID NO: 361 |
| (bevacizumab) | light chain = SEQ ID NO: 726 |
| anti-VEGF-PD1ecd-41BBLecd | heavy chain = SEQ ID NO: 366 |
| (bevacizumab) | light chain = SEQ ID NO: 717 |
| anti-VEGF-PD1ecd-CD30Lecd | heavy chain = SEQ ID NO: 366 |
| (bevacizumab) | light chain = SEQ ID NO: 718 |
| anti-VEGF-PD1ecd-CD40Lecd | heavy chain = SEQ ID NO: 366 |
| (bevacizumab) | light chain = SEQ ID NO: 719 |
| anti-VEGF-PD1ecd-CD70ecd | heavy chain = SEQ ID NO: 366 |
| (bevacizumab) | light chain = SEQ ID NO: 720 |
| anti-VEGF-PD1ecd-GITRLecd | heavy chain = SEQ ID NO: 366 |
| (bevacizumab) | light chain = SEQ ID NO: 721 |
| anti-VEGF-PD1ecd-ICOSLecd | heavy chain = SEQ ID NO: 366 |
| (bevacizumab) | light chain = SEQ ID NO: 722 |
| anti-VEGF-PD1ecd-IL12ecd | heavy chain = SEQ ID NO: 366 |
| (bevacizumab) | light chain = SEQ ID NO: 723 |
| anti-VEGF-PD1ecd-IL15ecd | heavy chain = SEQ ID NO: 366 |
| (bevacizumab) | light chain = SEQ ID NO: 724 |
| anti-VEGF-PD1ecd-LIGHTecd | heavy chain = SEQ ID NO: 366 |
| (bevacizumab) | light chain = SEQ ID NO: 725 |
| anti-VEGF-PD1ecd-OX40Lecd | heavy chain = SEQ ID NO: 366 |
| (bevacizumab) | light chain = SEQ ID NO: 726 |
| anti-VEGF-SIGLEC10ecd-41BBLecd | heavy chain = SEQ ID NO: 368 |
| (bevacizumab) | light chain = SEQ ID NO: 717 |
| anti-VEGF-SIGLEC10ecd-CD30Lecd | heavy chain = SEQ ID NO: 368 |
| (bevacizumab) | light chain = SEQ ID NO: 718 |
| anti-VEGF-SIGLEC10ecd-CD40Lecd | heavy chain = SEQ ID NO: 368 |
| (bevacizumab) | light chain = SEQ ID NO: 719 |
| anti-VEGF-SIGLEC10ecd-CD70ecd | heavy chain = SEQ ID NO: 368 |
| (bevacizumab) | light chain = SEQ ID NO: 720 |
| anti-VEGF-SIGLEC10ecd-GITRLecd | heavy chain = SEQ ID NO: 368 |
| (bevacizumab) | light chain = SEQ ID NO: 721 |
| anti-VEGF-SIGLEC10ecd-ICOSLecd | heavy chain = SEQ ID NO: 368 |
| (bevacizumab) | light chain = SEQ ID NO: 722 |
| anti-VEGF-SIGLEC10ecd-IL12ecd | heavy chain = SEQ ID NO: 368 |
| (bevacizumab) | light chain = SEQ ID NO: 723 |
| anti-VEGF-SIGLEC10ecd-IL15ecd | heavy chain = SEQ ID NO: 368 |
| (bevacizumab) | light chain = SEQ ID NO: 724 |
| anti-VEGF-SIGLEC10ecd-LIGHTecd | heavy chain = SEQ ID NO: 368 |
| (bevacizumab) | light chain = SEQ ID NO: 725 |
| anti-VEGF-SIGLEC10ecd-OX40Lecd | heavy chain = SEQ ID NO: 368 |
| (bevacizumab) | light chain = SEQ ID NO: 726 |
| anti-VEGF-SIRPaecd-41BBLecd | heavy chain = SEQ ID NO: 369 |
| (bevacizumab) | light chain = SEQ ID NO: 717 |
| anti-VEGF-SIRPaecd-CD30Lecd | heavy chain = SEQ ID NO: 369 |
| (bevacizumab) | light chain = SEQ ID NO: 718 |
| anti-VEGF-SIRPaecd-CD40Lecd | heavy chain = SEQ ID NO: 369 |
| (bevacizumab) | light chain = SEQ ID NO: 719 |
| anti-VEGF-SIRPaecd-CD70ecd | heavy chain = SEQ ID NO: 369 |
| (bevacizumab) | light chain = SEQ ID NO: 720 |
| anti-VEGF-SIRPaecd-GITRLecd | heavy chain = SEQ ID NO: 369 |
| (bevacizumab) | light chain = SEQ ID NO: 721 |
| anti-VEGF-SIRPaecd-ICOSLecd | heavy chain = SEQ ID NO: 369 |
| (bevacizumab) | light chain = SEQ ID NO: 722 |
| anti-VEGF-SIRPaecd-IL12ecd | heavy chain = SEQ ID NO: 369 |
| (bevacizumab) | light chain = SEQ ID NO: 723 |
| anti-VEGF-SIRPaecd-IL15ecd | heavy chain = SEQ ID NO: 369 |
| (bevacizumab) | light chain = SEQ ID NO: 724 |
| anti-VEGF-SIRPaecd-LIGHTecd | heavy chain = SEQ ID NO: 369 |
| (bevacizumab) | light chain = SEQ ID NO: 725 |
| anti-VEGF-SIRPaecd-OX40Lecd | heavy chain = SEQ ID NO: 369 |
| (bevacizumab) | light chain = SEQ ID NO: 726 |
| anti-VEGF-TGFbRecd-41BBLecd | heavy chain = SEQ ID NO: 370 |
| (bevacizumab) | light chain = SEQ ID NO: 717 |
| anti-VEGF-TGFbRecd-CD30Lecd | heavy chain = SEQ ID NO: 370 |
| (bevacizumab) | light chain = SEQ ID NO: 718 |
| anti-VEGF-TGFbRecd-CD40Lecd | heavy chain = SEQ ID NO: 370 |
| (bevacizumab) | light chain = SEQ ID NO: 719 |
| anti-VEGF-TGFbRecd-CD70ecd | heavy chain = SEQ ID NO: 370 |
| (bevacizumab) | light chain = SEQ ID NO: 720 |
| anti-VEGF-TGFbRecd-GITRLecd | heavy chain = SEQ ID NO: 370 |
| (bevacizumab) | light chain = SEQ ID NO: 721 |
| anti-VEGF-TGFbRecd-ICOSLecd | heavy chain = SEQ ID NO: 370 |
| (bevacizumab) | light chain = SEQ ID NO: 722 |
| anti-VEGF-TGFbRecd-IL12ecd | heavy chain = SEQ ID NO: 370 |
| (bevacizumab) | light chain = SEQ ID NO: 723 |
| anti-VEGF-TGFbRecd-IL15ecd | heavy chain = SEQ ID NO: 370 |
| (bevacizumab) | light chain = SEQ ID NO: 724 |
| anti-VEGF-TGFbRecd-LIGHTecd | heavy chain = SEQ ID NO: 370 |
| (bevacizumab) | light chain = SEQ ID NO: 725 |
| anti-VEGF-TGFbRecd-OX40Lecd | heavy chain = SEQ ID NO: 370 |
| (bevacizumab) | light chain = SEQ ID NO: 726 |
| anti-VEGF-TIM3ecd-41BBLecd | heavy chain = SEQ ID NO: 371 |
| (bevacizumab) | light chain = SEQ ID NO: 717 |
| anti-VEGF-TIM3ecd-CD30Lecd | heavy chain = SEQ ID NO: 371 |
| (bevacizumab) | light chain = SEQ ID NO: 718 |
| anti-VEGF-TIM3ecd-CD40Lecd | heavy chain = SEQ ID NO: 371 |
| (bevacizumab) | light chain = SEQ ID NO: 719 |
| anti-VEGF-TIM3ecd-CD70ecd | heavy chain = SEQ ID NO: 371 |
| (bevacizumab) | light chain = SEQ ID NO: 720 |
| anti-VEGF-TIM3ecd-GITRLecd | heavy chain = SEQ ID NO: 371 |
| (bevacizumab) | light chain = SEQ ID NO: 721 |
| anti-VEGF-TIM3ecd-ICOSLecd | heavy chain = SEQ ID NO: 371 |
| (bevacizumab) | light chain = SEQ ID NO: 722 |
| anti-VEGF-TIM3ecd-IL12ecd | heavy chain = SEQ ID NO: 371 |
| (bevacizumab) | light chain = SEQ ID NO: 723 |
| anti-VEGF-TIM3ecd-IL15ecd | heavy chain = SEQ ID NO: 371 |
| (bevacizumab) | light chain = SEQ ID NO: 724 |
| anti-VEGF-TIM3ecd-LIGHTecd | heavy chain = SEQ ID NO: 371 |
| (bevacizumab) | light chain = SEQ ID NO: 725 |
| anti-VEGF-TIM3ecd-OX40Lecd | heavy chain = SEQ ID NO: 371 |
| (bevacizumab) | light chain = SEQ ID NO: 726 |
| anti-CEACAM5/CD3 (cibisatamab) fused | heavy chains = SEQ ID NOs: 747, 748 |
| to BTLA on HC | light chains = SEQ ID NOs: 218, 219 |
| anti-CEACAM5/CD3 (cibisatamab) fused | heavy chains = SEQ ID NOs: 216, 217 |
| to BTLA on LC | light chains = SEQ ID NOs: 749, 219 |
| anti-CEACAM5/CD3 (cibisatamab) fused | heavy chains = SEQ ID NOs: 216, 217 |
| to BTLA on LC | light chains = SEQ ID NOs: 218, 750 |
| anti-CEACAM5/CD3 (cibisatamab) fused | heavy chains = SEQ ID NOs: 751, 752 |
| to PD1 onHC | light chains = SEQ ID NOs: 218, 219 |
| anti-CEACAM5/CD3 (cibisatamab) fused | heavy chains = SEQ ID NOs: 216, 217 |
| to PD1 on LC | light chains = SEQ ID NOs: 753, 219 |
| anti-CEACAM5/CD3 (cibisatamab) fused | heavy chains = SEQ ID NOs: 216, 217 |
| to PD1 on LC | light chains = SEQ ID NOs: 218, 754 |
| anti-CEACAM5/CD3 (cibisatamab) fused | heavy chains = SEQ ID NOs: 755, 756 |
| to SIGLEC10 on HC | light chains = SEQ ID NOs: 218, 219 |
| anti-CEACAM5/CD3 (cibisatamab) fused | heavy chains = SEQ ID Nos: 216, 217 |
| to SIGLEC10 on LC | light chains = SEQ ID Nos: 757, 219 |
| anti-CEACAM5/CD3 (cibisatamab) fused | heavy chains = SEQ ID NOs: 216, 217 |
| to SIGLEC10 on LC | light chains = SEQ ID NOs: 218, 758 |
| anti-CEACAM5/CD3 (cibisatamab) fused | heavy chains = SEQ ID NOs: 759, 760 |
| to SIRPa on HC | light chains = SEQ ID NOs: 218, 219 |
| anti-CEACAM5/CD3 (cibisatamab) fused | heavy chains = SEQ ID NOs: 216, 217 |
| to SIRPa on LC | light chains = SEQ ID NOs: 761, 219 |
| anti-CEACAM5/CD3 (cibisatamab) fused | heavy chains = SEQ ID NOs: 216, 217 |
| to SIRPa on LC | light chains = SEQ ID NOs: 218, 762 |
| anti-CEACAM5/CD3 (cibisatamab) fused | heavy chains = SEQ ID NOs: 763, 764 |
| to TGFbR on HC | light chains = SEQ ID NOs: 218, 219 |
| anti-CEACAM5/CD3 (cibisatamab) fused | heavy chains = SEQ ID NOs: 765, 766 |
| to TIM3 on HC | light chains = SEQ ID NOs: 218, 219 |
| anti-CEACAM5/CD3 (cibisatamab) fused | heavy chains = SEQ ID NOs: 216, 217 |
| to TIM3 on LC | light chains = SEQ ID NOs: 767, 219 |
| anti-CEACAM5/CD3 (cibisatamab) fused | heavy chains = SEQ ID NOs: 216, 217 |
| to TIM3 on LC | light chains = SEQ ID NOs: 218, 768 |
| anti-CEACAM5/CD3 (cibisatamab) fused | heavy chains = SEQ ID NOs: 769, 770 |
| to VEGFR on HC | light chains = SEQ ID NOs: 218, 219 |
| anti-CD3/CD19 (blinatumomab) fused | SEQ ID NO: 727 |
| to BTLA | |
| anti-CD3/CD19 (blinatumomab) fused | SEQ ID NO: 728 |
| to BTLA | |
| anti-CD3/PSMA (pasotuxizumab) fused | SEQ ID NO: 729 |
| to BTLA | |
| anti-CD3/PSMA (pasotuxizumab) fused | SEQ ID NO: 730 |
| to BTLA | |
| anti-CD3/CD19 (blinatumomab) fused | SEQ ID NO: 731 |
| to PD1 | |
| anti-CD3/CD19 (blinatumomab) fused | SEQ ID NO: 732 |
| to PD1 | |
| anti-CD3/PSMA (pasotuxizumab) fused | SEQ ID NO: 733 |
| to PD1 | |
| anti-CD3/PSMA (pasotuxizumab) fused | SEQ ID NO: 734 |
| to PD1 | |
| anti-CD3/CD19 (blinatumomab) fused | SEQ ID NO: 735 |
| to SIGLEC10 | |
| anti-CD3/CD19 (blinatumomab) fused | SEQ ID NO: 736 |
| to SIGLEC10 | |
| anti-CD3/PSMA (pasotuxizumab) fused | SEQ ID NO: 737 |
| to SIGLEC10 | |
| anti-CD3/PSMA (pasotuxizumab) fused | SEQ ID NO: 738 |
| to SIGLEC10 | |
| anti-CD3/CD19 (blinatumomab) fused | SEQ ID NO: 739 |
| to SIRPa | |
| anti-CD3/CD19 (blinatumomab) fused | SEQ ID NO: 740 |
| to SIRPa | |
| anti-CD3/PSMA (pasotuxizumab) fused | SEQ ID NO: 741 |
| to SIRPa | |
| anti-CD3/PSMA (pasotuxizumab) fused | SEQ ID NO: 742 |
| to SIRPa | |
| anti-CD3/CD19 (blinatumomab) fused | SEQ ID NO: 743 |
| to TIM3 | |
| anti-CD3/CD19 (blinatumomab) fused | SEQ ID NO: 744 |
| to TIM3 | |
| anti-CD3/PSMA (pasotuxizumab) fused | SEQ ID NO: 745 |
| to TIM3 | |
| anti-CD3/PSMA (pasotuxizumab) fused | SEQ ID NO: 746 |
| to TIM3 | |

[0630] The following examples are provided to further illustrate the embodiments of the present invention, but are not intended to limit the scope of the invention. While they are typical of those that might be used, other procedures, methodologies, or techniques known to those skilled in the art may alternatively be used.

### EXAMPLES

### Example 1

### Methods

[0631] The amino acid sequences of exemplary fusion proteins of the invention were codon optimized with GeneOptimizer®. The cDNA for the antibody heavy chain and the cDNA for the antibody light chain were gene synthesized and subsequently cloned into separate plasmids (pEvi3; evitria AG, Switzerland) under the control of a mammalian promoter and polyadenylation signal. Plasmid DNA was amplified in E. coli and DNA was purified using anion exchange kits for low endotoxin plasmid DNA preparation. DNA concentration was determined by measuring the absorption at a wavelength of 260 nm. Correctness of the sequences was verified with Sanger sequencing (with up to two sequencing reactions per plasmid depending on the size of the cDNA.) The plasmid DNAs for heavy and light chain were subsequently co-transfected into suspension-adapted CHO K1 cells (originally received from ATCC and adapted to serum-free growth in suspension culture at evitria). The seed was grown in eviGrow medium, a chemically defined, animal-component free, serum-free medium. Cells were transfected with eviFect (evitria AG, Switzerland). and the CHO cells were cultured in eviMake2 (evitria AG, Switzerland), a serum-free, animal-component free medium. Production was terminated once viability reached 75%, which occurred at day 8 after transfection. Supernatant was harvested by centrifugation and subsequent filtration (0.2 um filter). The antibody was purified using MabSelect™ Sure™ (Protein A affinity chromatography on a Bio-Rad BioLogic FuoFlow FPLC machine with subsequent gel filtration as polishing and rebuffering step). In some cases, the antibody was further purified using SEC purification.

[0632] The fusion proteins of the invention can also be produced via stable transfection of a mammalian cell line (e.g. CHO K1 cells) with plasmid DNA encoding the chains of the fusion protein, selection of stably transfected cell clones or cell pools expressing the fusion protein, development of a Master Cell Bank for production of the fusion protein, purification of the fusion protein by Protein A affinity chromatography and/or SEC, and formulation using methods well described in the art.

### Example 2

### Anti-PDL1-BTLAecd, Anti-PDL1-TGFbRII, Anti-PDL1-TGFbRIIecd-BTLAecd, Anti-PD1-BTLAecd, Anti-PD1-TGFbRIIecd, and Anti-PD1-TGFbRIIecd-BTLAecd Fusion Proteins

[0633] Anti-PDL1-BTLAecd was designed to target both PD-L1 and BTLA ligand (HVEM) by fusing the C-terminus of the heavy chain of an anti-PDL1 antibody with a ligand binding sequence of the extracellular domain of human BTLA (BTLAecd) via a flexible linker peptide, (GGGGS)3. Anti-PDL1-TGFbRIIecd-BTLAecd was designed to target PD-L1, TGFb, and BLTA ligands (HVEM) by fusing the C-terminus of the heavy chain of an anti-PDL1 antibody with a ligand binding sequence of the extracellular domain of human TGFbRII (TGFbRIIecd) via a flexible linker peptide, (GGGGS)3, and fusing the C-terminus of the light chain of an anti-PDL1 antibody with a ligand binding sequence of the extracellular domain of human BTLA (BTLAecd) via a flexible linker peptide, (GGGGS)3.

[0634] Anti-PD1-BTLAecd was designed to target both PD-1 and BTLA ligand (HVEM) by fusing the C-terminus of the heavy chain of an anti-PD1 antibody (pembrolizumab) with a ligand binding sequence of the extracellular domain of human BTLA (BTLAecd) via a flexible linker peptide, (GGGGS)3. Anti-PD1-TGFbRIIecd was designed to target PD-1 and TGFb by fusing the C-terminus of the heavy chain of an anti-PD1 antibody (pembrolizumab) with a ligand binding sequence of the extracellular domain of human TGFbRII (TGFbRIIecd) via a flexible linker peptide, (GGGGS)3. Anti-PD1-TGFbRIIecd-BTLAecd was designed to target PD-1, TGFb, and BTLA ligands (HVEM) by fusing the C-terminus of the heavy chain of an anti-PD1 antibody (pembrolizumab) with a ligand binding sequence of the extracellular domain of human TGFbRII (TGFbRIIecd) via a flexible linker peptide, (GGGGS)3, and fusing the C-terminus of the light chain of an anti-PD1 antibody with a ligand binding sequence of the extracellular domain of human BTLA (BTLAecd) via a flexible linker peptide, (GGGGS)3.

[0635] FIG. 3 shows the characterization of anti-PDL1-BTLAecd, anti-PDL1-TGFbRII and anti-PDL1-TGFbRIIecd-BTLAecd. SDS-PAGE under reducing (R) and non-reducing (NR) conditions was used to compare the full-length (FL), heavy chain (HC) and light chain (LC) of anti-PDL1 (atezolizumab), anti-PDL1-BTLAecd and anti-PDL1-TGFbRIIecd-BTLAecd (FIG. 3A). SDS-PAGE confirmed the expected higher molecular weight of the heavy chain of anti-PDL1-BTLAecd compared to the heavy chain of anti-PDL1 antibody. SDS-PAGE of anti-PDL1-BTLAecd confirmed the expected higher molecular weight of the heavy chain compared to the heavy chain of anti-PDL1 antibody (Light chain of anti-PDL1-BTLAecd is identical to anti-PDL1). SDS-PAGE of anti-PDL1-TGFbRIIecd-BTLAecd confirmed the expected higher molecular weight of the heavy chain (anti-PDL1 HC fused to TGFbRIIecd) compared to the heavy chain of anti-PDL1 antibody, and the expected higher molecular weight of the light chain (anti-PDL1 LC fused to BTLAecd) compared to the light chain of anti-PDL1.

[0636] SEC-HPLC analysis of anti-PDL1 (atezolizumab), anti-PDL1-BTLAecd and anti-PDL1-TGFbRIIecd-BTLAecd (>99% monomericity) (FIG. 3B).

[0637] FIG. 4 shows the target binding ability of anti-PDL1-BTLAecd, anti-PDL1-TGFbRII and anti-PDL1-TGFbRIIecd-BTLAecd. Standard ELISA showing the ability of anti-PDL1 (atezolizumab), anti-PDL1-BTLAecd and anti-PDL1-TGFbRIIecd-BTLAecd to bind PD-L1. Plate was coated with the indicated amount of each antibody or ALT (0-1 ug/mL) followed by addition of biotinylated huPD-L1 (1 ug/ml) (FIG. 4A). Binding to biotinylated PD-L1 was detected by avidin-HRP (ELISA). Plate coated with anti-PD1 (nivolumab) served as a negative control (FIG. 4A).

[0638] Standard ELISA showing the ability of anti-PDL1-TGFbRIIecd and anti-PDL1-TGFbRIIecd-BTLAecd to bind TGFb. Plate was coated with the indicated amount of anti-PDL1-TGFbRIIecd, anti-PDL1-TGFbRIIecd-BTLAecd, anti-PDL1-BTLAecd, or TGFbRIIecd-Fc (0-1 ug/mL) followed by addition of biotinylated TGFb (1 ng/ml) (FIG. 4B). Binding to biotinylated TGFb was detected by avidin-HRP (ELISA). Plate coated with TGFbRIIecd-Fc served as a positive control, and plate coated with anti-PDL1-BTLAecd served as a negative control (FIG. 4B).

[0639] Standard ELISA showing the ability of anti-PDL1-BTLAecd and anti-PDL1-TGFbRIIecd-BTLAecd to bind the BTLA ligand HVEM. Plate was coated with 5 ug/mL of each antibody-ligand trap (anti-PDL1-BTLAecd and anti-PDL1-TGFbRIIecd-BTLAecd) followed by addition of varying amounts of biotinylated huHVEM (0-1 ug/ml). Binding to biotinylated HuHVEM was detected by avidin-HRP (ELISA) (FIG. 4C).

[0640] ELISA showing the ability of anti-PDL1-BTLAecd and anti-PDL1-TGFbRIIecd-BTLAecd to simultaneously bind PD-L1 and the BTLA ligand HVEM (FIG. 4D). Varying amounts of each antibody (0-2 ug/mL; anti-PDL1-BTLAecd or anti-PDL1-TGFbRIIecd-BTLAecd) were added to plate coated with 1 ug/mL PDL1-Fc, and then washed before addition of 500 ng/mL biotinylated huHVEM. The ability of PD-L1-bound anti-PDL1-BTLAecd or anti-PDL1-TGFbRIIecd-BTLAecd to simultaneously bind biotinylated huHVEM (via BTLAecd fused to the heavy or light chain respectively) was detected by avidin-HRP (ELISA).

[0641] The ability of anti-PDL1, anti-PDL1-BTLAecd to elicit antitumor immunity and inhibit the growth of syngeneic B16-F10 tumors in C57BL/6 muMt-mice is shown in FIG. 5A. B16-F10 murine melanoma tumor cells were subcutaneously inoculated in B cell-deficient C57BL/6 muMt- (B cell deficient) mice (1×105 tumor cells/mouse). Mice bearing tumor xenografts were randomized into groups (n=5 per group) and treated with vehicle alone (control) or each of the following antibodies (5 mg/kg i.p/week): anti-PDL1 (atezolizumab) or anti-PDL1-BTLAecd. Treatment with anti-PDL1-BTLAecd was significantly more effective in inhibiting tumor growth compared to anti-PD-L1 (atezolizumab).

[0642] The ability of anti-PDL1, anti-PDL1-BTLAecd to elicit antitumor immunity and inhibit the growth of cancers was examined in human immune reconstituted NSG mice bearing human WiDR-colorectal cancer cells is shown in FIG. 5B. NSG mice immune were reconstituted with tumor-matched HLA A2+ human CD34+ HSC followed by subcutaneous implantation of WiDR tumor xenografts (3×106 tumor cells in Matrigel). Humanized mice bearing tumor xenografts were randomized into groups (n=6 per group) and treated with vehicle alone (control) or each of the following antibodies (5 mg/kg i.p q 6d): anti-PDL1 (atezolizumab), anti-PDL1-BTLAecd. Treatment with anti-PDL1-BTLAecd was significantly more effective in inhibiting tumor growth compared to anti-PD-L1 (atezolizumab)(p<0.02).

[0643] The ability of anti-PDL1, anti-PDL1-BTLAecd, anti-PDL1-TGFbRIIecd and anti-PDL1-BTLAecd-TGFbRIIecd to elicit antitumor immunity and inhibit the growth of cancers was examined in human immune reconstituted NSG mice bearing human BXPC3-pancreatic cancer cells. NSG mice immune were reconstituted with tumor-matched HLA A2+ human CD34+ HSC followed by subcutaneous implantation of BXPC3 tumor xenografts (3×106 tumor cells in Matrigel) is shown in FIG. 5C. Humanized mice bearing tumor xenografts were randomized into groups (n=6 per group) and treated with vehicle alone (control) or each of the following antibodies (5 mg/kg i.p q 6d): anti-PDL1 (atezolizumab), anti-PDL1-BTLAecd, anti-PDL1-TGFbRIIecd and anti-PDL1-BTLAecd-TGFbRIIecd. Treatment with anti-PDL1-BTLAecd-TGFbRIIecd was significantly more effective in inhibiting tumor growth compared to anti-PD-L1 (atezolizumab)(p<0.001), anti-PDL1-BTLAecd, or anti-PDL1-TGFbRIIecd (p<0.05).

[0644] These data demonstrate that BTLA ECD fused to the heavy or light chain of an antibody is capable of binding HVEM, thereby disrupting native BTLA-mediated SHP1/SHP2 inhibition and promoting HVEM-mediated co-stimulatory signaling. Furthermore, these data demonstrate that inhibition of BTLA/HVEM signaling with a decoy BTLA receptor ECD fused to a polypeptide that binds and disables another immuno-inhibitory molecule is effective in the treatment of cancer. Furthermore, these data demonstrate that the decoy BTLA receptor ECD fused to a polypeptide that binds and disables another T cell co-inhibitory molecule is effective in the treatment of cancer. Furthermore, these data demonstrate that decoy BTLA receptor ECD fused to a polypeptide that inhibits the interaction of a cytokine and its cytokine receptor is effective in the treatment of cancer. Furthermore, these data demonstrate that decoy BTLA receptor ECD fused to a polypeptide that binds a tumor cell surface molecule is effective in the treatment of cancer. Furthermore, these data demonstrate that decoy BTLA receptor ECD on either the heavy or light chain of the targeting polypeptide is capable of binding HVEM, thereby disrupting native BTLA-mediated SHP1/SHP2 inhibition and promoting HVEM-mediated co-stimulatory signaling, even while another receptor ECD is additionally fused to the antibody. Furthermore, these data demonstrate that decoy BTLA receptor ECD is effective in the treatment of cancer when part of a fusion protein comprising an additional ECD of a cytokine or cytokine receptor. Furthermore, these data demonstrate that decoy BTLA receptor ECD fused to an antibody can enable recruitment of T cells to tumor cells, since these data show that BTLA ECD can bind HVEM while the targeting antibody simultaneously binds a T cell surface molecule.

### Example 3

### Anti-VEGF-PD1 Fusion Protein

[0645] Mice are treated with mAbs 24 h prior to the radiotracer injection. Tissues are collected at 60 min after radiotracer injection, weighed and counted for radioactivity. Data is normalized for tissue weight and injected dose and presented as % ID/g. The radiotracer comprises a labeled high-affinity PDL1-binding peptide. Low % ID/g indicates effective competition with the labeled PD-L1 binding peptide. anti-VEGF-PD1 competes as effectively as anti-PDL1 mAb for binding PD-L1 in the tumor (FIG. 6A). CD3+ are counted in immunohistochemistry images of tumors in control group. anti-VEGF group, or anti-VEGF-PD1 ECD group. Treatment with anti-VEGF-PD1 results in significant increase of CD3+ cells (FIG. 6B). NSG mice immune reconstituted with tumor-matched HLA A2+ human CD34+ HSC and bearing KRAS mutant D-MUT1 human colorectal cancer tumor xenografts were treated (5 mg/kg i.p. weekly) with vehicle alone (untreated control) or the following antibodies (either alone or in combination), as indicated: with either vehicle alone (untreated control) or the following antibodies: anti-VEGF-PD1ecd; anti-VEGF (bevacizumab) [>=5 mice/group] (FIG. 6C). Tumor size was measured blinded to the treatment group and tumor volume was calculated using the formula (length×width×height). In vivo tumor growth curves (mean+SEM) are shown. p values were derived using unpaired, two-sided t-test.

[0646] These data demonstrate that a fusion protein that blocks VEGF and also comprises the ECD of a molecule that inhibits immune cells (e.g., T cells, dendritic cells, macrophages) is effective in treating cancer. These data demonstrate that a fusion protein that blocks VEGF and also comprises the ECD of a T cell co-inhibitory molecule is effective in treating cancer. These data demonstrate that a fusion protein that blocks VEGF and also comprises a polypeptide that binds a tumor cell surface molecule or molecule enriched in the tumor microenvironment is effective in localizing VEGF to the tumor microenvironment.

### Example 4

### Anti-VEGF-TGFbRII-PD1 Fusion Protein

[0647] Structure of anti-VEGF-TGFbRII-PD1 (FIG. 7A). anti-VEGF binds VEGF, TGFbRII binds TGFb, PD1 binds PD-L1 and PD-L2. NSG mice immune were reconstituted with tumor-matched HLA A2+ human CD34+ HSC followed by subcutaneous implantation of WiDR tumor xenografts (1.5×106 tumor cells in Matrigel) (FIG. 7B). Humanized mice bearing tumor xenografts were randomized into groups (n=5 per group) and treated with vehicle alone (control) or equimolar doses of each of the following antibodies (i.p q6d): anti-VEGF, anti-VEGF-PD1, anti-VEGF-TGFbRII-PD1. Treatment with anti-VEGF-TGFbRII-PD1 was significantly more effective in inhibiting tumor growth compared to anti-VEGF-PD1 or anti-VEGF. NSG mice immune were reconstituted with tumor-matched HLA A2+ human CD34+ HSC followed by subcutaneous implantation of BXPC3 tumor xenografts (2×106 tumor cells in Matrigel) (FIG. 7C). Humanized mice bearing tumor xenografts were randomized into groups (n=5 per group) and treated with vehicle alone (control) or equimolar doses of each of the following antibodies (i.p q6d): anti-VEGF, anti-VEGF+anti-PDL1, anti-VEGF-TGFbRII-PD1. Treatment with anti-VEGF-TGFbRII-PD1 was significantly more effective in inhibiting tumor growth compared to anti-VEGF+anti-PDL1 or anti-VEGF.

[0648] Standard ELISA showing the ability of anti-VEGF (bevacizumab), anti-VEGF-TGFbRII-PD1 to bind VEGF (FIG. 8A). Plate was coated with 2 ug/mL of anti-VEGF-PD1-TGFbRII or anti-VEGF (bevacizumab), followed by addition of biotinylated huVEGF in the amount indicated. Binding to biotinylated VEGF was detected by avidin-HRP (ELISA).

[0649] Standard ELISA showing the ability of anti-VEGF-TGFbRII-PD1 to bind TGFb (FIG. 8B). Plate was coated with the indicated amount of anti-VEGF-TGFbRII-PD1 (0-10 ug/mL) followed by addition of biotinylated PD-L1 (1000 ng/ml) or biotinylated PD-L1 (400 ng/mL). Binding to biotinylated PD-L1/PD-L2 was detected by avidin-HRP (ELISA).

[0650] Standard ELISA showing the ability of anti-VEGF-TGFbRII-PD1 to bind TGFb as well as IgG-TGFbRII (FIG. 8C). Plate was coated with 1 ug/mL of anti-VEGF-TGFbRII-PD1, IgG-TGFbRII as positive control, or anti-VEGF (bevacizumab) as negative control, followed by addition of varying amounts of biotinylated huTGFb1 (0-2000 pg/ml). Binding to biotinylated huTGFb1 was detected by avidin-HRP (ELISA)

[0651] These data demonstrate that blockade of TGFb and VEGF is more effective in treatment of cancer than blockade of VEGF alone. These data further demonstrate that a fusion protein comprising an anti-VEGF/VEGFR polypeptide and another polypeptide that inhibits angiogenesis (e.g., TGFb) is effective in the treatment of cancer. These data further demonstrate that a fusion protein comprising an antibody that inhibits angiogenesis fused to a receptor ECD that inhibits angiogenesis is effective in the treatment of cancer.

[0652] These data further demonstrate that a fusion protein comprising anti-VEGF/VEGFR antibody and a receptor ECD that inhibits angiogenesis is effective in the treatment of cancer. These data further demonstrate that a fusion protein comprising an anti-angiogenic polypeptide and a polypeptide that inhibits a key determinant of TH17 differentiation is effective in the treatment of cancer. These data further demonstrate that localized blockade of VEGF and/or TGFb in the tumor microenvironment is effective in the treatment of cancer.

### Example 5

### Anti-HER2-TGFbRII, Anti-HER2-PD1, Anti-EGFR-TGFbRII Fusion Proteins

[0653] SDS-PAGE under reducing (R) and non-reducing (NR) conditions was used to compare the full-length (FL), heavy chain (HC) and light chain (LC) of anti-HER2-TGFβRIIecd, anti-HER2-PD1ecd, and anti-HER2 (Trastuzumab) (FIG. 9A). The assay was repeated after storage of anti-HER2-TGFbRIIecd for 12 months at 4° C. to ensure its stability (right-most two lanes; marked in red).

[0654] The ability of anti-HER2-TGFβRII to simultaneously bind HER2 and TGF-β1 was evaluated by a ‘double-sandwich’ ELISA wherein anti-HER2-TGFβRIIecd was added to HER2-Fc coated plates, followed by rhTGF-β1 (1 ng/ml) that was detected by a biotinylated anti-huTGF-β1 antibody (FIG. 9B). The plate was incubated with Avidin-HRP and developed with TMB substrate. anti-HER2-TGFβRIIecd exhibited simultaneous binding to HER2 and TGF-β1.

[0655] The ability of anti-HER2-TGFβRII to bind TGF-β1 was also evaluated by competition immunoassays (FIG. 9C). The ELISA plate was coated with capture antibody (anti-TGF-β Ab, 1 μg/ml), followed by rhTGF-β1 in the presence of either anti-HER2-TGFβRII or anti-HER2 mAb (TGF-β1: antibody ratio, 1:1 to 1:100) for 1 h at RT. Unlike anti-HER2 mAb, anti-HER2-TGFβRII antibody exhibited the ability to compete for binding to TGF-β1.

[0656] The HER2-overexpressing human breast cancer cell line BT-474 was cultured in vitro in the presence of escalating concentrations of anti-HER2 mAb (trastuzumab: 5 μg/ml-20 μg/ml) for 3 months. Trastuzumab-resistant cells that continued to grow in the presence of trastuzumab (20 μg/ml) for 30 days were isolated and implanted subcutaneously into the R flank of 4-6 week female BALB/c nude mice bearing estrogen pellets (8×10⁶ cells/mouse). At 21d following tumor cell inoculation, the mice were randomized and treated with anti-HER2 mAb (Trastuzumab) (5 mg/kg, i.p, weekly×6 wks). anti-HER2 mAb failed to stop tumor progression.

[0657] To evaluate the antitumor activity of anti-HER2-TGFβRIIecd against tumors that resisted anti-HER2 mAb in vivo (TrastuzumabR BT-474), trastuzumab-resistant tumors harvested from trastuzumab-treated F1 mice were sectioned into 2×2 mm pieces and implanted subcutaneously into a second cohort of female BALB/c nude mice (TrastuzumabR BT-474-F2). Tumor-bearing F2 mice were treated with either trastuzumab (5 mg/kg, i.p, every 2 weeks×6) or anti-HER2-TGFβRIIecd (5 mg/kg i.p. every 2 weeks×6).

[0658] Residual tumors in TrastuzumabR BT-474 (BT-474-TR) F2 tumor-bearing mice following treatment with anti-HER2-TGFβRII were significantly smaller (mean±SEM=31.7±6.5) than those in F2 mice treated with anti-HER2 mAb (mean±SEM=453.9±121.4)(p=0.003) (FIG. 10A).

[0659] Whereas treatment of F2 mice bearing TrastuzumabR BT-474 tumor xenografts with trastuzumab showed continued tumor progression in 4/6 mice, all 7 mice treated with anti-HER2-TGFβRII showed complete inhibition of tumor growth (p=0.009).

[0660] Serum was collected from TrastuzumabR BT-474 tumor-bearing mice. A hydrochloric acid pre-treatment was performed, and serum concentrations of TGF-β1 were measured by ELISA (FIG. 10B).

[0661] In vivo treatment of tumor-bearing mice with anti-HER2-TGFbRIIecd completely sequestered activated serum TGFβ1 7 days after treatment.

[0662] Human tumor xenografts were generated by mammary fat pad implantation of the MDA-MB-231-Luc (D3H2LN) TNBC line in female immune deficient NOG mice (NOD/Shi-scid IL-2rgnull) (FIG. 11A). NOG mice (6-8 week old) were irradiated at 200 cGy and rested for 6-8 h, followed by adoptive transfer of human CD34+ cells (7×104/mouse) from a normal donor (HLA-matched to the TNBC line) (ALLCELLS). Mice were tested for engraftment of human CD3+ T cells in peripheral blood obtained via tail-bleed at 6-7 weeks following injection of CD34+ cells. The cells were stained with anti-huCD3-PE and anti-huCD19-FITC, and analyzed by flow cytometry. Mice demonstrating human CD3+ cell engraftment were injected with MDA-MB-231-Luc cells (2×106 cells in 50% PBS/50% matrigel). At 7d following tumor cell inoculation, mice were randomized and treated for 4 weeks with the following: (i) anti-EGFR-TGFβRII (5 mg/kg i.p. weekly); (ii) anti-EGFR mAb (Cetuximab; 5 mg/kg, i.p, weekly); (iii) anti-TGFβ Ab (1D11; 5 mg/kg i.p. weekly); (iv) Vehicle (Control). Treatment with anti-EGFR-TGFβRII resulted in significantly smaller tumors (257.6±58.5) compared to tumors in mice treated with cetuximab (766.3±64) (p<0.0001) or untreated controls (839.4±77.4)(p<0.0001).

[0663] Immune deficient NSG mice (NOD/Shi-scid IL-2rgnull; 6-8 weeks old) were irradiated at 200 cGy and rested for 6-8 h, followed by adoptive transfer of human CD34+ cells (7×104/mouse) from a normal donor (HLA-matched to the D-MUT1 line)(ALLCELLS) (FIG. 11B). Mice were tested for engraftment of human CD3+ T cells in peripheral blood obtained via tail-bleed at 8 weeks following injection of CD34+ cells. The cells were stained with anti-huCD3-PE, and analyzed by flow cytometry. Mice demonstrating human CD3+ cell engraftment were inoculated subcutaneously with a PDX of human HNSCC (moderately-poorly differentiated SCC harvested from the vocal cord). At 18 days following tumor cell inoculation, mice were randomized and treated with the following: (i) anti-EGFR-TGFβRIIecd (5 mg/kg i.p. weekly); (ii) anti-EGFR mAb (Cetuximab; 5 mg/kg, i.p, weekly); (iii) Vehicle (Untreated Control). Treatment with anti-EGFR-TGFβRIIecd resulted in significantly smaller tumors (261.3.1±95.0) compared to tumors in mice treated with cetuximab (588.6.0±61.9) (p=0.03) or untreated controls (898.0±85.4) (p=0.002).

[0664] Nude mice were inoculated subcutaneously with a PDX of human HNSCC (SCC harvested from the floor of the mouth) (FIG. 11C). At 21 days following tumor cell inoculation, mice were randomized and treated with the following: (i) anti-EGFR-TGFβRIIecd (5 mg/kg i.p. weekly); (ii) anti-EGFR mAb (Cetuximab; 5 mg/kg, i.p, weekly); (iii) Vehicle (Untreated Control). Treatment with anti-EGFR-TGFβRIIecd resulted in significantly smaller tumors (131.1±29.3) compared to tumors in mice treated with cetuximab (918.4±311.2) (p<0.05) or untreated controls (1107.9±210.0) (p=0.002).

[0665] These data demonstrate that tumor-targeted TGFbRII is effective in treating cancer. These data further demonstrate that fusion proteins comprising TGFbRII and a polypeptide that induces or promotes ADCC/FcR-mediated cross-presentation is effective in treating cancer.

### Example 6

### Anti-PD1-TIM3 and Anti-PDL1-TIM3 Fusion Proteins

[0666] Schematic of anti-PD1-TIM3ecd and anti-PDL1-TIM3ecd (FIG. 12A). Anti-PDL1-TIM3ecd was designed to target both PD-L1 and TIM3 ligands by fusing the C-terminus of the heavy chain of an anti-PDL1 antibody with a ligand binding sequence of the extracellular domain of TIM3 (TIM3ecd) via a flexible linker peptide, (GGGGS)3. Anti-PD1-TIM3ecd was designed to target both PD-1 and TIM3 ligands by fusing the C-terminus of the heavy chain of an anti-PD1 antibody with a ligand binding sequence of the extracellular domain of TIM3 (TIM3ecd) via a flexible linker peptide, (GGGGS)3.

[0667] The ability of anti-PD1-TIM3ecd and anti-PDL1-TIM3ecd to elicit antitumor immunity and inhibit the growth of cancers that are refractory to current checkpoint inhibitors, such as triple-negative breast cancer (TNBC) was investigated. Approximately 15-25% of patients with breast cancer have TNBC, an aggressive type that does not respond to hormonal agents or targeted therapy and has an increased risk of metastases. We used human immune reconstituted NSG mice bearing the bioluminescent human MDA-MB-231-luc (D3H2LN) TNBC cell line that expresses elevated PD-L1.

[0668] Anti-PD1-TIM3ecd (430.3±29.9) inhibits tumor growth significantly more effectively than untreated control (908.2±40.3), anti-PD-1 (824.0±38.3), IgG-TIM3ecd (825.1±79.0) or the combination of IgG-TIM3ecd and anti-PD1 (884.7±97.4) (p<0.0001) (FIG. 12B).

[0669] NSG mice immune reconstituted with tumor-matched HLA A2+ human CD34+ HSC and bearing MDA-MB23 1-Luc human TNBC tumor xenografts were treated (5 mg/kg i.p. every 6 days) with vehicle alone (untreated control) or the following antibodies (either alone or in combination), as indicated: with either vehicle alone (untreated control) or the following antibodies: anti-PD1-TIM3ecd; anti-PD1 (nivolumab); anti-TIM-3 (F38-2E2); or combination of anti-PD1 and anti-TIM-3.

[0670] Anti-PDL1-TIM3ecd (226.4±71.4) inhibits tumor growth more effectively than anti-PDL1 (617.5±144.3), anti-TIM-3 (640.9±99.6) or the combination of anti-TIM-3 and anti-PDL1 mAbs (653.0±59.8) (p<0.001) (FIG. 12B).

[0671] Treatment of MDA-MB-231-luc-bearing mice with either anti-PDL1, anti-PD1, anti-TIM3, or the combination of anti-PDL1 and anti-TIM-3 mAbs failed to inhibit tumor growth compared to untreated animals. In contrast, treatment with anti-PDL1-TIM3ecd was significantly more effective at inhibiting the progression of MDA-MB-231-luc tumors compared with untreated controls, or animals treated with either anti-PDL1, anti-PD1, anti-TIM3, or the combination of anti-PDL1 and anti-TIM-3 mAbs. NSG mice immune reconstituted with tumor-matched HLA A2+ human CD34+ HSC and bearing MDA-MB231-Luc human TNBC tumor xenografts were treated (5 mg/kg i.p. every 6 days) with vehicle alone (untreated control) or the following antibodies (either alone or in combination), as indicated: with either vehicle alone (untreated control) or the following antibodies: anti-PDL1-TIM3ecd; anti-PDL1 (atezolizumab); anti-TIM-3; anti-PD-1 (pembrolizumab); combination of anti-PDL1 and anti-TIM-3.

[0672] Although the invention has been described with reference to the above examples, it will be understood that modifications and variations are encompassed within the spirit and scope of the invention. Accordingly, the invention is limited only by the following claims.

The application's sequence listing, which the Patent Office published only in electronic form, follows.

SEQUENCE LISTING (775 sequences)

SEQ ID NO: 1 - protein, 448 aa, Artificial Sequence
  Description of Artificial Sequence: Synthetic polypeptide
QVQLQQWGAGLLKPSETLSLTCAVYGGSFSGYYWSWIRQSPEKGLEWIGEINHGGYVTYNPSLESRVTISVDTSKNQFSLKLSSVTAADTAVYYCARDYGPGNYDWYFDLWGRGTLVTVSSASTKGPSVFPLAPCSRSTSESTAALGCLVKDYFPEPVTVSWNSGALTSGVHTFPAVLQSSGLYSLSSVVTVPSSSLGTKTYTCNVDHKPSNTKVDKRVESKYGPPCPPCPAPEFLGGPSVFLFPPKPKDTLMISRTPEVTCVVVDVSQEDPEVQFNWYVDGVEVHNAKTKPREEQFNSTYRVVSVLTVLHQDWLNGKEYKCKVSNKGLPSSIEKTISKAKGQPREPQVYTLPPSQEEMTKNQVSLTCLVKGFYPSDIAVEWESNGQPENNYKTTPPVLDSDGSFFLYSRLTVDKSRWQEGNVFSCSVMHEALHNHYTQKSLSLSLGK

SEQ ID NO: 2 - protein, 216 aa, Artificial Sequence
  Description of Artificial Sequence: Synthetic polypeptide
EIVLTQSPATLSLSPGERATLSCRASQSVSSYLAWYQQKPGQAPRLLIYDASNRATGIPARFSGSGSGTDFTLTISSLEPEDFAVYYCQQRSNWPPALTFCGGTKVEIKRTVAAPSVFIFPPSDEQLKSGTASVVCLLNNFYPREAKVQWKVDNALQSGNSQESVTEQDSKDSTYSLSSTLTLSKADYEKHKVYACEVTHQGLSSPVTKSFNRGEC

SEQ ID NO: 3 - protein, 446 aa, Artificial Sequence
  Description of Artificial Sequence: Synthetic polypeptide
EVQLVESGGGLVQPGGSLRLSCAASGYSITNDYAWNWVRQAPGKGLEWVGYISYSGYTTYNPSLKSRFTISRDTSKNTLYLQMNSLRAEDTAVYYCARWTSGLDYWGQGTLVTVSSCSTKGPSVFPLAPSSKSTSGGTAALGCLVKDYFPEPVTVSWNSGALTSGVHTFPAVLQSSGLYSLSSVVTVPSSSLGTQTYICNVNHKPSNTKVDKKVEPKSCDKTHTCPPCPAPELLGGPSVFLFPPKPKDTLMISRTPEVTCVVVDVSHEDPEVKFNWYVDGVEVHNAKTKPREEQYNSTYRVVSVLTVLHQDWLNGKEYKCKVSNKALPAPIEKTISKAKGQPREPQVYTLPPSREEMTKNQVSLTCLVKGFYPSDIAVEWESNGQPENNYKTTPPVLDSDGSFFLYSKLTVDKSRWQQGNVFSCSVMHEALHNHYTQKSLSLSPGK

SEQ ID NO: 4 - protein, 214 aa, Artificial Sequence
  Description of Artificial Sequence: Synthetic polypeptide
DIQMTQSPSSLSASVGDRVTITCKASDLIHNWLAWYQQKPGKAFKLLIYGATSLETGVPSRFSGSGSGTDFTLTISSLQPEDFATYYCQQYWTTPFTFGQGTKVEIKRTVAAPSVFIFPPSDEQLKSGTASVVCLLENFYPREAKVQWKVDNALQSGNSQESVTEQDSKDSTYSLSSTLTLSKADYEKHKVYACEVTHQGLSSFVTKSFERGEC

SEQ ID NO: 5 - protein, 446 aa, Artificial Sequence
  Description of Artificial Sequence: Synthetic polypeptide
EVQLVESGGGLVQPGGSLRLSCAASGYSITNDYAWNWVRQAPGKGLEWVGYISYSGYTTYNPSLKSRFTISRDTSKNTLYLQMNSLRAEDTAVYYCARWTSGLDYWGQGTLVTVSSASTKGPSVFPLAPSSKSTSGGTAALGCLVKDYFPEPVTVSWNSGALTSGVHTFPAVLQSSGLYSLSSVVTVPSSSLGTQTYICNVNHKPSNTKVDKKVEPKSCDKTHTCPPCPAPELLGGPSVFLFPPKPKDTLMISRTPEVTCVVVDVSHEDPEVKFNWYVDGVEVHNAKTKPREEQYNSTYRVVSVLTVLHQDWLNGKEYKCKVSNKALPAPIEKTISKAKGQPREPQVYTLPPSREEMTKNQVSLTCLVKGFYPSDIAVEWESNGQPENNYKTTPPVLDSDGSFFLYSKLTVDKSRWQQGNVFSCSVMHEALHNHYTQKSLSLSPGK

SEQ ID NO: 6 - protein, 214 aa, Artificial Sequence
  Description of Artificial Sequence: Synthetic polypeptide
DIQMTQSPSSLSASVGDRVTITCKASDLIHNWLAWYQQKPGKAPKLLIYGATSLETGVPSRFSGSGSGTDFTLTISSLQPEDFATYYCQQYWTTPFTFGQGTKVEIKRTVAAPSVFIFPPSDEQLKSGTASVVCLLNNFYPREAKVQWKVDNALQSGNSQESVTEQDSKDSTYSLSSTLTLSKADYEKHKVYACEVTHQGLSSPVTKSFNRGEC

SEQ ID NO: 7 - protein, 453 aa, Artificial Sequence
  Description of Artificial Sequence: Synthetic polypeptide
QVQLVESGGGSVQPGRSLRLSCEASGFTFEAYAMHWVRQPPGKGLEWVSSINWNSGRIAYADSVKGRFTISRDNARNSLYLQMNSLRLEDTAFYYCAKDIRRFSTGGAEFEYWGQGTLVTVSSASTKGPSVFPLAPSSKSTSGGTAALGCLVKDYFPEPVTVSWNSGALTSGVHTFPAVLQSSGLYSLSSVVTVPSSSLGTQTYICNVNHKPSNTKVDKKVEPKSCDKTHTCPPCPAPELLGGPSVFLFPPKPKDTLMISRTPEVTCVVVDVSHEDPEVKFNWYVDGVEVHNAKTKPREEQYNSTYRVVSVLTVLHQDWLNGKEYKCKVSNKALPAPIEKTISKAKGQPREPQVYTLPPSREEMTKNQVSLTCLVKGFYPSDIAVEWESNGQPENNYKTTPPVLDSDGSFFLYSKLTVDKSRWQQGNVFSCSVMHEALHNHYTQKSLSLSPGK

SEQ ID NO: 8 - protein, 217 aa, Artificial Sequence
  Description of Artificial Sequence: Synthetic polypeptide
QSVLTQPPSASGTPGQRVTISCSGSSSNIGSNFVYWYQQLPGTAPKLLIYRNNQRPSGVPDRFSGSRSGTSASLAISGLRSEDEADYYCAAWDDSLGGHYVFGTGTKVTVLGQPKAAPSVTLFPPSSEELQANKATLVCLISDFYPGAVTVAWKADSSPVKAGVETTTPSKQSNNKYAASSYLSLTPEQWKSHRSYSCQVTHEGSTVEKTVAPTECS

SEQ ID NO: 9 - protein, 451 aa, Artificial Sequence
  Description of Artificial Sequence: Synthetic polypeptide
QVQLQQPGAELVKPGASVKMSCKASGYTFTSYNMHWVKQTPGRGLEWIGAIYPGNGDTSYNQKFKGKATLTADKSSSTAYMQLSSLTSEDSAVYYCARSTYYGGDWYFNVWGAGTTVTVSAASTKGPSVFPLAPSSKSTSGGTAALGCLVKDYFPEPVTVSWNSGALTSGVHTFPAVLQSSGLYSLSSVVTVPSSSLGTQTYICNVNHKPSNTKVDKKAEPKSCDKTHTCPPCPAPELLGGPSVFLFPPKPKDTLMISRTPEVTCVVVDVSHEDPEVKFNWYVDGVEVHNAKTKPREEQYNSTYRVVSVLTVLHQDWLNGKEYKCKVSNKALPAPIEKTISKAKGQPREPQVYTLPPSRDELTKNQVSLTCLVKGFYPSDIAVEWESNGQPENNYKTTPPVLDSDGSFFLYSKLTVDKSRWQQGNVFSCSVMHEALHNHYTQKSLSLSPGK

SEQ ID NO: 10 - protein, 213 aa, Artificial Sequence
  Description of Artificial Sequence: Synthetic polypeptide
QIVLSQSPAILSASPGEKVTMTCRASSSVSYIHWFQQKPGSSPKPWIYATSNLASGVPVRFSGSGSGTSYSLTISRVEAEDAATYYCQQWTSNPPTFGGGTKLEIKRTVAAPSVFIFPPSDEQLKSGTASVVCLLNNFYPREAKVQWKVDNALQSGNSQESVTEQDSKDSTYSLSSTLTLSKADYEKHKVYACEVTHQGLSSPVTKSFNRGEC

SEQ ID NO: 11 - protein, 446 aa, Artificial Sequence
  Description of Artificial Sequence: Synthetic polypeptide
QIQLQQSGPEVVKPGASVKISCKASGYTFTDYYITWVKQKPGQGLEWIGWIYPGSGNTKYNEKFKGKATLTVDTSSSTAFMQLSSLTSEDTAVYFCANYGNYWFAYWGQGTQVTVSAASTKGPSVFPLAPSSKSTSGGTAALGCLVKDYFPEPVTVSWNSGALTSGVHTFPAVLQSSGLYSLSSVVTVPSSSLGTQTYICNVNHKPSNTKVDKKVEPKSCDKTHTCPPCPAPELLGGPSVFLFPPKPKDTLMISRTPEVTCVVVDVSHEDPEVKFNWYVDGVEVHNAKTKPREEQYNSTYRVVSVLTVLHQDWLNGKEYKCKVSNKALPAPIEKTISKAKGQPREPQVYTLPPSRDELTKNQVSLTCLVKGFYPSDIAVEWESNGQPENNYKTTPPVLDSDGSFFLYSKLTVDKSRWQQGNVFSCSVMHEALHNHYTQKSLSLSPG

SEQ ID NO: 12 - protein, 218 aa, Artificial Sequence
  Description of Artificial Sequence: Synthetic polypeptide
DIVLTQSPASLAVSLGQRATISCKASQSVDFDGDSYMNWYQQKPGQPPKVLIYAASNLESGIPARFSGSGSGTDFTLNIHPVEEEDAATYYCQQSNEDPWTFGGGTKLEIKRTVAAPSVFIFPPSDEQLKSGTASVVCLLNNFYPREAKVQWKVDNALQSGNSQESVTEQDSKDSTYSLSSTLTLSKADYEKHKVYACEVTHQGLSSPVTKSFNRGEC

SEQ ID NO: 13 - protein, 446 aa, Artificial Sequence
  Description of Artificial Sequence: Synthetic polypeptide
QVQLQQSGAELAKPGASVKMSCKASGYTFTSYRMHWVKQRPGQGLEWIGYINPSTGYTEYNQKFKDKATLTADKSSSTAYMQLSSLTFEDSAVYYCARGGGVFDYWGQGTTLTVSSASTKGPSVFPLAPSSKSTSGGTAALGCLVKDYFPEPVTVSWNSGALTSGVHTFPAVLQSSGLYSLSSVVTVPSSSLGTQTYICNVNHKPSNTKVDKKVEPKSCDKTHTCPPCPAPELLGGPSVFLFPPKPKDTLMISRTPEVTCVVVDVSHEDPEVKFNWYVDGVEVHNAKTKPREEQYNSTYRVVSVLTVLHQDWLNGKEYKCKVSNKALPAPIEKTISKAKGQPREPQVYTLPPSRDELTKNQVSLTCLVKGFYPSDIAVEWESNGQPENNYKTTPPVLDSDGSFFLYSKLTVDKSRWQQGNVFSCSVMHEALHNHYTQKSLSLSPGK

SEQ ID NO: 14 - protein, 214 aa, Artificial Sequence
  Description of Artificial Sequence: Synthetic polypeptide
DIQMTQSPSTLSASVGDRVTITCRASQSINTWLAWYQQKPGKAPKLLMYKASSLESGVPSRFIGSGSGTEFTLTISSLQPDDFATYYCQQYNSDSKMFGQGTKVEVKRTVAAPSVFIFPPSDEQLKSGTASVVCLLNNFYPREAKVQWKVDNALQSGNSQESVTEQDSKDSTYSLSSTLTLSKADYEKHKVYACEVTHQGLSSPVTKSFNRGEC

SEQ ID NO: 15 - protein, 452 aa, Artificial Sequence
  Description of Artificial Sequence: Synthetic polypeptide
EVQLLESGGGLVQPGGSLRLSCAVSGFTFNSFAMSWVRQAPGKGLEWVSAISGSGGGTYYADSVKGRFTISRDNSKNTLYLQMNSLRAEDTAVYFCAKDKILWFGEPVFDYWGQGTLVTVSSASTKGPSVFPLAPSSKSTSGGTAALGCLVKDYFPEPVTVSWNSGALTSGVHTFPAVLQSSGLYSLSSVVTVPSSSLGTQTYICNVNHKPSNTKVDKRVEPKSCDKTHTCPPCPAPELLGGPSVFLFPPKPKDTLMISRTPEVTCVVVDVSHEDPEVKFNWYVDGVEVHNAKTKPREEQYNSTYRVVSVLTVLHQDWLNGKEYKCKVSNKALPAPIEKTISKAKGQPREPQVYTLPPSREEMTKNQVSLTCLVKGFYPSDIAVEWESNGQPENNYKTTPPVLDSDGSFFLYSKLTVDKSRWQQGNVFSCSVMHEALHNHYTQKSLSLSPGK

SEQ ID NO: 16 - protein, 214 aa, Artificial Sequence
  Description of Artificial Sequence: Synthetic polypeptide
EIVLTQSPATLSLSPGERATLSCRASQSVSSYLAWYQQKPGQAPRLLIYDASNRATGIPARFSGSGSGTDFTLTISSLEPEDFAVYYCQQRSNWPPTFGQGTKVEIKRTVAAPSVFIFPPSDEQLKSGTASVVCLLNNFYPREAKVQWKVDNALQSGNSQESVTEQDSKDSTYSLSSTLTLSKADYEKHKVYACEVTHQGLSSPVTKSFNRGEC

SEQ ID NO: 17 - protein, 453 aa, Artificial Sequence
  Description of Artificial Sequence: Synthetic polypeptide
QVQLVQSGSELKKPGASVKVSCKASGYTFTHYGMNWVRQAPGQGLKWMGWINTYTGEPTYADDFKGRFVFSLDTSVSTAYLQISSLKAEDTAVYYCARRRYEGNYVFYYFDYWGQGTTVTVSSASTKGPSVFPLAPSSKSTSGGTAALGCLVKDYFPEPVTVSWNSGALTSGVHTFPAVLQSSGLYSLSSVVTVPSSSLGTQTYICNVNHKPSNTKVDKKVEPKSCDKTHTCPPCPAPELLGGPSVFLFPPKPKDTLMISRTPEVTCVVVDVSHEDPEVKFNWYVDGVEVHNAKTKPREEQYNSTYRVVSVLTVLHQDWLNGKEYKCKVSNKALPAPIEKTISKAKGQPREPQVYTLPPSREEMTKNQVSLTCLVKGFYPSDIAVEWESNGQPENNYKTTPPVLDSDGSFFLYSKLTVDKSRWQQGNVFSCSVMHEALHNHYTQKSLSLSPGK

SEQ ID NO: 18 - protein, 214 aa, Artificial Sequence
  Description of Artificial Sequence: Synthetic polypeptide
DIQMTQSPSSLSASVGDRVTITCRASENIYSYFSWYQQKPGKAPKLLIYTAKTLAEGVPSRFSGSGSGTDFTLTISSLQPEDFATYYCQHHYVTPYTFGGGTKVEIKRTVAAPSVFIFPPSDEQLKSGTASVVCLLNNFYPREAKVQWKVDNALQSGNSQESVTEQDSKDSTYSLSSTLTLSKADYEKHKVYACEVTHQGLSSPVTKSFNRGEC

SEQ ID NO: 19 - protein, 442 aa, Artificial Sequence
  Description of Artificial Sequence: Synthetic polypeptide
EVQLQESGPGLVKPSETLSLTCTVSGYSITSNYYWNWIRQPPGKGLEWMGYIRYDGSNNYNPSLKNRVTISRDTSKNQFSLKLSSVTAADTAVYYCARLDYWGQGTTVTVSSASTKGPSVFPLAPSSKSTSGGTAALGCLVKDYFPEPVTVSWNSGALTSGVHTFPAVLQSSGLYSLSSVVTVPSSSLGTQTYICNVNHKPSNTKVDKKVEPKSCDKTHTCPPCPAPELLGGPSVFLFPPKPKDTLMISRTPEVTCVVVDVSHEDPEVKFNWYVDGVEVHNAKTKPREEQYNSTYRVVSVLTVLHQDWLNGKEYKCKVSNKALPAPIEKTISKAKGQPREPQVYTLPPSREEMTKNQVSLTCLVKGFYPSDIAVEWESNGQPENNYKTTPPVLDSDGSFFLYSKLTVDKSRWQQGNVFSCSVMHEALHNHYTQKSLSLSPGK

SEQ ID NO: 20 - protein, 219 aa, Artificial Sequence
  Description of Artificial Sequence: Synthetic polypeptide
DAVMTQTPLSLSVTPGQPASISCRSSQSLENTNGNTFLNWYLQKPGQSPQLLIYRVSNRFSGVPDRFSGSGSGTDFTLKISRVEAEDVGVYYCLQVTHVPFTFGQGTKLEIKRTVAAPSVFIFPPSDEQLKSGTASVVCLLNNFYPREAKVQWKVDNALQSGNSQESVTEQDSKDSTYSLSSTLTLSKADYEKHKVYACEVTHQGLSSPVTKSFNRGEC

SEQ ID NO: 21 - protein, 446 aa, Artificial Sequence
  Description of Artificial Sequence: Synthetic polypeptide
QVQLQQPGAELVKPGASVMMSCKASGYTFTNYNMHWVKQTPGQGLEWIGTIYPGNDDTSYNQKFKDKATLTADKSSSAAYMQLSSLTSEDSAVYYCARGGYRAMDYWGQTSVTVSSASTKGPSVFPLAPSSKSTSGGTAALGCLVKDYFPEPVTVSWNSGALTSGVHTFPAVLQSSGLYSLSSVVTVPSSSLGTQTYICNVNHKPSNTKVDKKVEPKSCDKTHTCPPCPAPELLGGPSVFLFPPKPKDTLMISRTPEVTCVVVDVSHEDPEVKFNWYVDGVEVHNAKTKPREEQYNSTYRVVSVLTVLHQDWLNGKEYKCKVSNKALPAPIEKTISKAKGQPREPQVYTLPPSREEMTKNQVSLTCLVKGFYPSDIAVEWESNGQPENNYKTTPPVLDSDGSFFLYSKLTVDKSRWQQGNVFSCSVMHEALHNHYTQKSLSLSPGK

SEQ ID NO: 22 - protein, 219 aa, Artificial Sequence
  Description of Artificial Sequence: Synthetic polypeptide
DVLMTQTPLSLPVSLGDQASISCRSSQSIVYSNGNTYLGWYLQKPGQSPKLLIYKVSNRFSGVPDRFSGSGSGTDFTLKISRVEAEDLGVYHCFQGSHVPYTFGGGTKVEIKRTVAAPSVFIFPPSDEQLKSGTASVVCLLNNFYPREAKVQWKVDNALQSGNSQESVTEQDSKDSTYSLSSTLTLSKADYEKHKVYACEVTHQGLSSPVTKSFNRGEC

SEQ ID NO: 23 - protein, 447 aa, Artificial Sequence
  Description of Artificial Sequence: Synthetic polypeptide
EVQLVQSGAEVKKPGESLKISCKASGYAFSSSWINWVRQMPGKGLEWMGRIYPRAGDTNYAGKFKDQVTISADKSISTAYLQWSSLKASDTAMYYCASLLDYSMDYWGQGTLVTVSSASTKGPSVFPLAPSSKSTSGGTAALGCLVKDYFPEPVTVSWNSGALTSGVHTFPAVLQSSGLYSLSSVVTVPSSSLGTQTYICNVNHKPSNTKVDKKVEPKSCDKTHTCPPCPAPELLGGPSVFLFPPKPKDTLMISRTPEVTCVVVDVSHEDPEVKFNWYVDGVEVHNAKTKPREEQYNSTYRVVSVLTVLHQDWLNGKEYKCKVSNKALPAPIEKTISKAKGQPREPQVYTLPPSREEMTKNQVSLTCLVKGFYPSDIAVEWESNGQPENNYKTTPPVLDSDGSFFLYSKLTVDKSRWQQGNVFSCSVMHEALHNHYTQKSLSLSPGK

SEQ ID NO: 24 - protein, 214 aa, Artificial Sequence
  Description of Artificial Sequence: Synthetic polypeptide
DIQMTQSPSSLSASVGDRVTITCRASQDISNYLNWYQQKPGKAPKLLIYYTSRLHSGVPSRFSGSGSGTDFTFTISSLQPEDIATYYCQQGNTLPLTFGQGTKVEIKRTVAAPSVFIFPPSDEQLKSGTASVVCLLNNFYPREAKVQWKVDNALQSGNSQESVTEQDSKDSTYSLSSTLTLSKADYEKHKVYACEVTHQGLSSPVTKSFNRGEC

SEQ ID NO: 25 - protein, 449 aa, Artificial Sequence
  Description of Artificial Sequence: Synthetic polypeptide
EVQLVESGGGVVQPGRSLRLSCSASGFDFTTYWMSWVRQAPGKGLEWIGEIHPDSSTINYAPSLKDRFTISRDNAKNTLFLQMDSLRPEDTGVYFCASLYFGFPWFAYWGQGTPVTVSSASTKGPSVFPLAPSSKSTSGGTAALGCLVKDYFPEPVTVSWNSGALTSGVHTFPAVLQSSGLYSLSSVVTVPSSSLGTQTYICNVNHKPSNTKVDKRVEPKSCDKTHTCPPCPAPELLGGPSVFLFPPKPKDTLMISRTPEVTCVVVDVSHEDPEVKFNWYVDGVEVHNAKTKPREEQYNSTYRVVSVLTVLHQDWLNGKEYKCKVSNKALPAPIEKTISKAKGQPREPQVYTLPPSREEMTKNQVSLTCLVKGFYPSDIAVEWESNGQPENNYKTTPPVLDSDGSFFLYSKLTVDKSRWQQGNVFSCSVMHEALHNHYTQKSLSLSPGK

SEQ ID NO: 26 - protein, 213 aa, Artificial Sequence
  Description of Artificial Sequence: Synthetic polypeptide
DIQLTQSPSSLSASVGDRVTITCKASQDVGTSVAWYQQKPGKAPKLLIYWTSTRHTGVPSRFSGSGSGTDFTFTISSLQPEDIATYYCQQYSLYRSFGQGTKVEIKRTVAAPSVFIFPPSDEQLKSGTASVVCLLNNFYPREAKVQWKVDNALQSGNSQESVTEQDSKDSTYSLSSTLTLSKADYEKHKVYACEVTHQGLSSPVTKSFNRGEC

SEQ ID NO: 27 - protein, 420 aa, Artificial Sequence
  Description of Artificial Sequence: Synthetic polypeptide
QVQLVESGGGVVQPGRSLRLSCAASGFTFSSYTMHWVRQAPGKGLEWVTFISYDGNNKYYADSVKGRFTISRDNSKNTLYLQMNSLRAEDTAIYYCARTGWLGPFDYWGQGTLVTVSSASTKGPSVFPLAPSSKSTSGGTAALGCLVKDYFPEPVTVSWNSGALTSGVHTFPAVLQSSGLYSLSSVVTVPSSSLGTQTYICNVNHKPSNTKVDKRVEPKSCDKTHTCPPCPAPELLGGPSVFLFPPKPKDTLMISRTPEVTCVVVDVSHEDPEVKFNWYVDGVEVHNAKTKPREEQYNSTYRVVSVLTVLHQDWLNGKEYKCKVSNKALPAPIEKTISKAKGQPREPQVYTLPPSRDELTKNQVSLTCLVKGFYPSDIAVEWESNGQPENNYKTTPPVLDSDGSFFLYSKLTVDKSRWQQ

SEQ ID NO: 28 - protein, 215 aa, Artificial Sequence
  Description of Artificial Sequence: Synthetic polypeptide
EIVLTQSPGTLSLSPGERATLSCRASQSVGSSYLAWYQQKPGQAPRLLIYGAFSRATGIPDRFSGSGSGTDFTLTISRLEPEDFAVYYCQQYGSSPWTFGQGTKVEIKRTVAAPSVFIFPPSDEQLKSGTASVVCLLNNFYPREAKVQWKVDNALQSGNSQESVTEQDSKDSTYSLSSTLTLSKADYEKHKVYACEVTHQGLSSPVTKSFNRGEC

SEQ ID NO: 29 - protein, 447 aa, Artificial Sequence
  Description of Artificial Sequence: Synthetic polypeptide
QVQLVQSGAEVKKPGASVKVSCKASGYTFTNYGMNWVRQAPGQGLEWMGWINTYTGEPTYADDFKGRVTMTTDTSTSTAYMELRSLRSDDTAVYYCARIGDSSPSDYWGQGTLVTVSSASTKGPSVFPLAPSSKSTSGGTAALGCLVKDYFPEPVTVSWNSGALTSGVHTFPAVLQSSGLYSLSSVVTVPSSSLGTQTYICNVNHKPSNTKVDKKVEPKSCDKTHTCPPCPAPELLGGPSVFLFPPKPKDTLMISRTPEVTCVVVDVSHEDPEVKFNWYVDGVEVHNAKTKPREEQYNSTYRVVSVLTVLHQDWLNGKEYKCKVSNKALPAPIEKTISKAKGQPREPQVYTLPPSRDELTKNQVSLTCLVKGFYPSDIAVEWESNGQPENNYKTTPPVLDSDGSFFLYSKLTVDKSRWQQGNVFSCSVMHEALHNHYTQKSLSLSPG

SEQ ID NO: 30 - protein, 214 aa, Artificial Sequence
  Description of Artificial Sequence: Synthetic polypeptide
EIVMTQSPATLSVSPGERATLSCKASQSVSNDVVWYQQKPGQAPRLLIYYASNRYTGIPARFSGSGSGTEFTLTISSLQSEDFAVYYCQQDYTSPWTFGQGTKLEIKRTVAAPSVFIFPPSDEQLKSGTASVVCLLNNFYPREAKVQWKVDNALQSGNSQESVTEQDSKDSTYSLSSTLTLSKADYEKHKVYACEVTHQGLSSPVTKSFNRGEC

SEQ ID NO: 31 - protein, 453 aa, Artificial Sequence
  Description of Artificial Sequence: Synthetic polypeptide
EVQLVESGGGLVQPGGSLRLSCAASGYTFTNYGMNWVRQAPGKGLEWVGWINTYTGEPTYAADFKRRFTFSLDTSKSTAYLQMNSLRAEDTAVYYCAKYPHYYGSSHWYFDVWGQGTLVTVSSASTKGPSVFPLAPSSKSTSGGTAALGCLVKDYFPEPVTVSWNSGALTSGVHTFPAVLQSSGLYSLSSVVTVPSSSLGTQTYICNVNHKPSNTKVDKKVEPKSCDKTHTCPPCPAPEAAGGPSVFLFPPKPKDTLMISRTPEVTCVVVDVSHEDPEVKFNWYVDGVEVHNAKTKPREEQYNSTYRVVSVLTVLHQDWLNGKEYKCKVSNKALPAPIEKTISKAKGQPREPQVYTLPPSREEMTKNQVSLTCLVKGFYPSDIAVEWESNGQPENNYKTTPPVLDSDGSFFLYSKLTVDKSRWQQGNVFSCSVMHEALHNHYTQKSLSLSPGK

SEQ ID NO: 32 - protein, 214 aa, Artificial Sequence
  Description of Artificial Sequence: Synthetic polypeptide
DIQMTQSPSSLSASVGDRVTITCSASQDISNYLNWYQQKPGKAPKVLIYFTSSLHSGVPSRFSGSGSGTDFTLTISSLQPEDFATYYCQQYSTVPWTFGQGTKVEIKRTVAAPSVFIFPPSDEQLKSGTASVVCLLNNFYPREAKVQWKVDNALQSGNSQESVTEQDSKDSTYSLSSTLTLSKADYEKHKVYACEVTHQGLSSPVTKSFNRGEC

SEQ ID NO: 33 - protein, 452 aa, Artificial Sequence
  Description of Artificial Sequence: Synthetic polypeptide
QVQLVQSGAEVKKPGSSVKVSCKASGGTFSSYWIEWVRQAPGQGLEWMGEILPGSGNTYYNERFKDRVTITADESTSTAYMELSSLRSEDTAVYYCARRAAAYYSNPEWFAYWGQGTLVTVSSASTKGPSVFPLAPSSKSTSGGTAALGCLVKDYFPEPVTVSWNSGALTSGVHTFPAVLQSSGLYSLSSVVTVPSSSLGTQTYICNVNHKPSNTKVDKKVEPKSCDKTHTCPPCPAPELLGGPSVFLFPPKPKDTLMISRTPEVTCVVVDVSHEDPEVKFNWYVDGVEVHNAKTKPREEQYNSTYRVVSVLTVLHQDWLNGKEYKCKVSNKALPAPIEKTISKAKGQPREPQVYTLPPSRDELTKNQVSLTCLVKGFYPSDIAVEWESNGQPENNYKTTPPVLDSDGSFFLYSKLTVDKSRWQQGNVFSCSVMHEALHNHYTQKSLSLSPG

SEQ ID NO: 34 - protein, 215 aa, Artificial Sequence
  Description of Artificial Sequence: Synthetic polypeptide
EIVLTQSPATLSLSPGERATLSCTASSSVNSFYLHWYQQKPGLAPRLLIYSTSNLASGIPDRFSGSGSGTDFTLTISRLEPEDFAVYYCHQYHRSPYTFGQGTKLEIKRTVAAPSVFIFPPSDEQLKSGTASVVCLLNNFYPREAKVQWKVDNALQSGNSQESVTEQDSKDSTYSLSSTLTLSKADYEKHKVYACEVTHQGLSSPVTKSFNRGEC

SEQ ID NO: 35 - protein, 452 aa, Artificial Sequence
  Description of Artificial Sequence: Synthetic polypeptide
QVQLVQSGAEVKKPGSSVKVSCKASGGTFSSYWIEWVRQAPGQGLEWMGEILPGSGNTYYNERFKDRVTITADESTSTAYMELSSLRSEDTAVYYCARRAAAYYSNPEWFAYWGQGTLVTVSSASTKGPSVFPLAPSSKSTSGGTAALGCLVKDYFPEPVTVSWNSGALTSGVHTFPAVLQSSGLYSLSSVVTVPSSSLGTQTYICNVNHKPSNTKVDKKVEPKSSDKTHTCPPCPAPELLGGPSVFLFPPKPKDTLMISRTPEVTCVVVDVSHEDPEVKFNWYVDGVEVHNAKTKPREEQYNSTYRVVSVLTVLHQDWLNGKEYKCKVSNKALPAPIEKTISKAKGQPREPQVYTLPPSRDELTKNQVSLTCLVKGFYPSDIAVEWESNGQPENNYKTTPPVLDSDGSFFLYSKLTVDKSRWQQGNVFSCSVMHEALHNHYTQKSLSLSPG

SEQ ID NO: 36 - protein, 445 aa, Artificial Sequence
  Description of Artificial Sequence: Synthetic polypeptide
QVQLQESGPGLVKPSETLSLTCTVSGGSVSSGDYYWTWIRQSPGKGLEWIGHIYYSGNTNYNPSLKSRLTISIDTSKTQFSLKLSSVTAADTAIYYCVRDRVTGAFDIWGQGTMVTVSSASTKGPSVFPLAPCSRSTSESTAALGCLVKDYFPEPVTVSWNSGALTSGVHTFPAVLQSSGLYSLSSVVTVPSSNFGTQTYTCNVDHKPSNTKVDKTVERKCCVECPPCPAPPVAGPSVFLFPPKPKDTLMISRTPEVTCVVVDVSHEDPEVQFNWYVDGVEVHNAKTKPREEQFNSTFRVVSVLTVVHQDWLNGKEYKCKVSNKGLPAPIEKTISKTKGQPREPQVYTLPPSREEMTKNQVSLTCLVKGFYPSDIAVEWESNGQPENNYKTTPPMLDSDGSFFLYSKLTVDKSRWQQGNVFSCSVMHEALHNHYTQKSLSLSPGK

SEQ ID NO: 37 - protein, 214 aa, Artificial Sequence
  Description of Artificial Sequence: Synthetic polypeptide
DIQMTQSPSSLSASVGDRVTITCQASQDISNYLNWYQQKPGKAPKLLIYDASNLETGVPSRFSGSGSGTDFTFTISSLQPEDIATYFCQHFDHLPLAFGGGTKVEIKRTVAAPSVFIFPPSDEQLKSGTASVVCLLNNFYPREAKVQWKVDNALQSGNSQESVTEQDSKDSTYSLSSTLTLSKADYEKHKVYACEVTHQGLSSPVTKSFNRGEC

SEQ ID NO: 38 - protein, 451 aa, Artificial Sequence
  Description of Artificial Sequence: Synthetic polypeptide
QVQLQESGPGLVKPSQTLSLTCTVSGGSISSGDYYWSWIRQPPGKGLEWIGYIYYSGSTDYNPSLKSRVTMSVDTSKNQFSLKVNSVTAADTAVYYCARVSIFGVGTFDYWGQGTLVTVSSASTKGPSVLPLAPSSKSTSGGTAALGCLVKDYFPEPVTVSWNSGALTSGVHTFPAVLQSSGLYSLSSVVTVPSSSLGTQTYICNVNHKPSNTKVDKRVEPKSCDKTHTCPPCPAPELLGGPSVFLFPPKPKDTLMISRTPEVTCVVVDVSHEDPEVKFNWYVDGVEVHNAKTKPREEQYNSTYRVVSVLTVLHQDWLNGKEYKCKVSNKALPAPIEKTISKAKGQPREPQVYTLPPSREEMTKNQVSLTCLVKGFYPSDIAVEWESNGQPENNYKTTPPVLDSDGSFFLYSKLTVDKSRWQQGNVFSCSVMHEALHNHYTQKSLSLSPGK

SEQ ID NO: 39 - protein, 214 aa, Artificial Sequence
  Description of Artificial Sequence: Synthetic polypeptide
EIVMTQSPATLSLSPGERATLSCRASQSVSSYLAWYQQKPGQAPRLLIYDASNRATGIPARFSGSGSGTDFTLTISSLEPEDFAVYYCHQYGSTPLTFGGGTKAEIKRTVAAPSVFIFPPSDEQLKSGTASVVCLLNNFYPREAKVQWKVDNALQSGNSQESVTEQDSKDSTYSLSSTLTLSKADYEKHKVYACEVTHQGLSSPVTKSFNRGEC

SEQ ID NO: 40 - protein, 446 aa, Artificial Sequence
  Description of Artificial Sequence: Synthetic polypeptide
EVQLQESGPGLVKPSQTLSLTCTVSGYSISNDFAWNWIRQLPGKGLEWMGYISYKGNTRYQPSLKSRITISRDTSKNQFFLKLNSVTAADTATYYCVTASRGLPYWGQGTLVTVSSASTKGPSVFPLAPSSKSTSGGTAALGCLVKDYFPEPVTVSWNSGALTSGVHTFPAVLQSSGLYSLSSVVTVPSSSLGTQTYICNVNHKPSNTKVDKKVEPKSCDKTHTCPPCPAPELLGGPSVFLFPPKPKDTLMISRTPEVTCVVVDVSHEDPEVKFNWYVDGVEVHNAKTKPREEQYNSTYRVVSVLTVLHQDWLNGKEYKCKVSNKALPAPIEKTISKAKGQPREPQVYTLPPSREEMTKNQVSLTCLVKGFYPSDIAVEWESNGQPENNYKTTPPVLDSDGSFFLYSKLTVDKSRWQQGNVFSCSVMHEALHNHYTQKSLSLSPGK

SEQ ID NO: 41 - protein, 214 aa, Artificial Sequence
  Description of Artificial Sequence: Synthetic polypeptide
DIQMTQSPSSMSVSVGDRVTITCHSSQDITYNIGWLQQKPGKSFKGLIYHGANLDDGVPSRFSGSGSGTDYTLTISSLQPEDFATYYCVQYDEFPWTFGGGTKLEIKRTVAAPSVFIFPPSDEQLKSGTASVVCLLNNFYPREAKVQWKVDNALQSGNSQESVTEQDSKDSTYSLSSTLTLSKADYEKHKVYACEVTHQGLSSPVTKSFNRGEC

SEQ ID NO: 42 - protein, 449 aa, Artificial Sequence
  Description of Artificial Sequence: Synthetic polypeptide
QVQLKQSGPGLVQPSQSLSITCTVSGFSLTNYGVHWVRQSPGKGLEWLGVIWSGGNTDYNTPFTSRLSINKDNSKSQVFFKMNSLQSNDTAIYYCARALTYYDYEFAYWGQGTLVTVSAASTKGPSVFPLAPSSKSTSGGTAALGCLVKDYFPEPVTVSWNSGALTSGVHTFPAVLQSSGLYSLSSVVTVPSSSLGTQTYICNVNHKPSNTKVDKRVEPKSCDKTHTCPPCPAPELLGGPSVFLFPPKPKDTLMISRTPEVTCVVVDVSHEDPEVKFNWYVDGVEVHNAKTKPREEQYNSTYRVVSVLTVLHQDWLNGKEYKCKVSNKALPAPIEKTISKAKGQPREPQVYTLPPSRDELTKNQVSLTCLVKGFYPSDIAVEWESNGQPENNYKTTPPVLDSDGSFFLYSKLTVDKSRWQQGNVFSCSVMHEALHNHYTQKSLSLSPGK

SEQ ID NO: 43 - protein, 214 aa, Artificial Sequence
  Description of Artificial Sequence: Synthetic polypeptide
DILLTQSPVILSVSPGERVSFSCRASQSIGTNIHWYQQRTNGSPRLLIKYASESISGIPSRFSGSGSGTDFTLSINSVESEDIADYYCQQNNNWPTTFGAGTKLELKRTVAAPSVFIFPPSDEQLKSGTASVVCLLNNFYPREAKVQWKVDNALQSGNSQESVTEQDSKDSTYSLSSTLTLSKADYEKHKVYACEVTHQGLSSPVTKSFNRGEC

SEQ ID NO: 44 - protein, 446 aa, Artificial Sequence
  Description of Artificial Sequence: Synthetic polypeptide
DVQLQESGPGLVKPSQSLSLTCTVTAYSVTSDYAWNWIRQFPGNKLEWMGYISYSGTTRYNPSLKSRISITRDTSKNQFFLQLNSMTAEDTATYYCSRQGRGFPYWGQGTLVTVSAASTKGPSVFPLAPSSKSTSGGTAALGCLVKDYFPEPVTVSWNSGALTSGVHTFPAVLQSSGLYSLSSVVTVPSSSLGTQTYICNVNHKPSNTKVDKKVEPKSCDKTHTCPPCPAPELLGGPSVFLFPPKPKDTLMISRTPEVTCVVVDVSHEDPEVKFNWYVDGVEVHNAKTKPREEQYNSTYRVVSVLTVLHQDWLNGKEYKCKVSNKALPAPIEKTISKAKGQPREPQVYTLPPSREEMTKNQVSLTCLVKGFYPSDIAVEWESNGQPENNYKTTPPVLDSDGSFFLYSKLTVDKSRWQQGNVFSCSVMHEALHNHYTQKSLSLSPGK

SEQ ID NO: 45 - protein, 214 aa, Artificial Sequence
  Description of Artificial Sequence: Synthetic polypeptide
DILMTQSPSSMSVSLGDTVSITCHASQDINSNIGWLQQKPGKSFKGLIYHGTNLEDGVPSRFSGSGSGADYSLTISSLESEDFADYYCVQYAQFPWTFGGGTKLEIKRTVAAPSVFIFPPSDEQLKSGTASVVCLLNNFYPREAKVQWKVDNALQSGNSQESVTEQDSKDSTYSLSSTLTLSKADYEKHKVYACEVTHQGLSSPVTKSFNRGEC

SEQ ID NO: 46 - protein, 446 aa, Artificial Sequence
  Description of Artificial Sequence: Synthetic polypeptide
QVQLQESGPGLVKPSQTLSLTCTVSGYSISSDFAWNWIRQPPGKGLEWMGYISYSGNTRYQPSLKSRITISRDTSKNQFFLKLNSVTAADTATYYCVTAGRGFPYWGQGTLVTVSSASTKGPSVFPLAPSSKSTSGGTAALGCLVKDYFPEPVTVSWNSGALTSGVHTFPAVLQSSGLYSLSSVVTVPSSSLGTQTYICNVNHKPSNTKVDKKVEPKSCDKTHTCPPCPAPELLGGPSVFLFPPKPKDTLMISRTPEVTCVVVDVSHEDPEVKFNWYVDGVEVHNAKTKPREEQYNSTYRVVSVLTVLHQDWLNGKEYKCKVSNKALPAPIEKTISKAKGQPREPQVYTLPPSRDELTKNQVSLTCLVKGFYPSDIAVEWESNGQPENNYKTTPPVLDSDGSFFLYSKLTVDKSRWQQGNVFSCSVMHEALHNHYTQKSLSLSPGK

SEQ ID NO: 47 - protein, 214 aa, Artificial Sequence
  Description of Artificial Sequence: Synthetic polypeptide
DIQMTQSPSSMSVSVGDRVTITCHSSQDINSNIGWLQQKPGKSFKGLIYHGTNLDDGVPSRFSGSGSGTDYTLTISSLQPEDFATYYCVQYAQFPWTFGGGTKLEIKRTVAAPSVFIFPPSDEQLKSGTASVVCLLNNFYPREAKVQWKVDNALQSGNSQESVTEQDSKDSTYSLSSTLTLSKADYEKHKVYACEVTHQGLSSPVTKSFNRGEC

SEQ ID NO: 48 - protein, 452 aa, Artificial Sequence
  Description of Artificial Sequence: Synthetic polypeptide
QVQLVQPGAEVRKPGASVKVSCKASGYRFTSYYIDWVRQAPGQGLEWMGRIDPEDAGTKYAQKFQGRVTMTADTSTSTVYVELSSLRSEDTAVYYCARYEWETVVVGDLMYEYEYWGQGTLVTVSSASTKGPSVFPLAPCSRSTSESTAALGCLVKDYFPEPVTVSWNSGALTSGVHTFPAVLQSSGLYSLSSVVTVPSSSLGTKTYTCNVDHKPSNTKVDKRVESKYGPPCPPCPAPEFLGGPSVFLFPPKPKDTLMISRTPEVTCVVVDVSQEDPEVQFNWYVDGVEVHNAKTKPREEQFNSTYRVVSVLTVLHQDWLNGKEYKCKVSNKGLPSSIEKTISKAKGQPREPQVYTLPPSQEEMTKNQVSLTCLVKGFYPSDIAVEWESNGQPENNYKTTPPVLDSDGSFFLYSRLTVDKSRWQEGNVFSCSVMHEALHNHYTQKSLSLSLG

SEQ ID NO: 49 - protein, 214 aa, Artificial Sequence
  Description of Artificial Sequence: Synthetic polypeptide
DIQMTQSPSSLSASVGDRVTITCQASQSISSYLAWYQQKPGQAPKILIYGASRLKTGVPSRFSGSGSGTSFTLTISSLEPEDAATYYCQQYASVPVTFGQGTKVEIKRTVAAPSVFIFPPSDEQLKSGTASVVCLLNNFYPREAKVQWKVDNALQSGNSQESVTEQDSKDSTYSLSSTLTLSKADYEKHKVYACEVTHQGLSSPVTKSFNRGEC

SEQ ID NO: 50 - protein, 443 aa, Artificial Sequence
  Description of Artificial Sequence: Synthetic polypeptide
EVQLLQSGPELEKPGASVMISCKASGSSFTGYNMNWVRQNIGKSLEWIGAIDPYYGGTSYNQKFKGRATLTVDKSSSTAYMHLKSLTSEDSAVYYCVSGMEYWGQGTSVTVSSASTKGPSVFPLAPSSKSTSGGTAALGCLVKDYFPEPVTVSWNSGALTSGVHTFPAVLQSSGLYSLSSVVTVPSSSLGTQTYICNVNHKPSNTKVDKRVEPKSCDKTHTCPPCPAPELLGGPSVFLFPPKPKDTLMISRTPEVTCVVVDVSHEDPEVKFNWYVDGVEVHNAKTKPREEQYNSTYRVVSVLTVLHQDWLNGKEYKCKVSNKALPAPIEKTISKAKGQPREPQVYTLPPSREEMTKNQVSLTCLVKGFYPSDIAVEWESNGQPENNYKTTPPVLDSDGSFFLYSKLTVDKSRWQQGNVFSCSVMHEALHNHYTQKSLSLSPGK

SEQ ID NO: 51 - protein, 220 aa, Artificial Sequence
  Description of Artificial Sequence: Synthetic polypeptide
EIVMTQSPATLSVSPGERATLSCRSSQSLVHRNGNTYLHWYLQKPGQSPKLLIHKVSNRFSGVPDRFSGSGSGTDFTLKISRVEAEDLGVYFCSQSTHVPPLTFGAGTKLELKRTVAAPSVFIFPPSDEQLKSGTASVVCLLNNFYPREAKVQWKVDNALQSGNSQESVTEQDSKDSTYSLSSTLTLSKADYEKHKVYACEVTHQGLSSPVTKSFNRGEC

SEQ ID NO: 52 - protein, 448 aa, Artificial Sequence
  Description of Artificial Sequence: Synthetic polypeptide
EVQLVESGGGLVQPGGSLRLSCAASGFTFTDYTMDWVRQAPGKGLEWVADVNPNSGGSIYNQRFKGRFTLSVDRSKNTLYLQMNSLRAEDTAVYYCARNLGPSFYFDYWGQGTLVTVSSASTKGPSVFPLAPSSKSTSGGTAALGCLVKDYFPEPVTVSWNSGALTSGVHTFPAVLQSSGLYSLSSVVTVPSSSLGTQTYICNVNHKPSNTKVDKKVEPKSCDKTHTCPPCPAPELLGGPSVFLFPPKPKDTLMISRTPEVTCVVVDVSHEDPEVKFNWYVDGVEVHNAKTKPREEQYNSTYRVVSVLTVLHQDWLNGKEYKCKVSNKALPAPIEKTISKAKGQPREPQVYTLPPSREEMTKNQVSLTCLVKGFYPSDIAVEWESNGQPENNYKTTPPVLDSDGSFFLYSKLTVDKSRWQQGNVFSCSVMHEALHNHYTQKSLSLSPG

SEQ ID NO: 53 - protein, 214 aa, Artificial Sequence
  Description of Artificial Sequence: Synthetic polypeptide
DIQMTQSPSSLSASVGDRVTITCKASQDVSIGVAWYQQKPGKAPKLLIYSASYRYTGVPSRFSGSGSGTDFTLTISSLQPEDFATYYCQQYYIYPYTFGQGTKVEIKRTVAAPSVFIFPPSDEQLKSGTASVVCLLNNFYPREAKVQWKVDNALQSGNSQESVTEQDSKDSTYSLSSTLTLSKADYEKHKVYACEVTHQGLSSPVTKSFNRGEC

SEQ ID NO: 54 - protein, 450 aa, Artificial Sequence
  Description of Artificial Sequence: Synthetic polypeptide
EVQLVESGGGLVQPGGSLRLSCAASGFNIKDTYIHWVRQAPGKGLEWVARIYPTNGYTRYADSVKGRFTISADTSKNTAYLQMNSLRAEDTAVYYCSRWGGDGFYAMDYWGQGTLVTVSSASTKGPSVFPLAPSSKSTSGGTAALGCLVKDYFPEPVTVSWNSGALTSGVHTFPAVLQSSGLYSLSSVVTVPSSSLGTQTYICNVNHKPSNTKVDKKVEPKSCDKTHTCPPCPAPELLGGPSVFLFPPKPKDTLMISRTPEVTCVVVDVSHEDPEVKFNWYVDGVEVHNAKTKPREEQYNSTYRVVSVLTVLHQDWLNGKEYKCKVSNKALPAPIEKTISKAKGQPREPQVYTLPPSREEMTKNQVSLTCLVKGFYPSDIAVEWESNGQPENNYKTTPPVLDSDGSFFLYSKLTVDKSRWQQGNVFSCSVMHEALHNHYTQKSLSLSPGK

SEQ ID NO: 55 - protein, 214 aa, Artificial Sequence
  Description of Artificial Sequence: Synthetic polypeptide
DIQMTQSPSSLSASVGDRVTITCRASQDVNTAVAWYQQKPGKAPKLLIYSASFLYSGVPSRFSGSRSGTDFTLTISSLQPEDFATYYCQQHYTTPPTFGQGTKVEIKRTVAAPSVFIFPPSDEQLKSGTASVVCLLNNFYPREAKVQWKVDNALQSGNSQESVTEQDSKDSTYSLSSTLTLSKADYEKHKVYACEVTHQGLSSPVTKSFNRGEC

SEQ ID NO: 56 - protein, 446 aa, Artificial Sequence
  Description of Artificial Sequence: Synthetic polypeptide
QVQLQESGPGLVKPSETLSLTCTVSGGSISIYYWSWIRQPPGKGLEWIGYVYYSGSTNYNPSLKSRVTISVDTSKNQFSLKLNSVTAADTAVYYCARGGYDFWSGYFDYWGQGTLVTVSSASTKGPSVFPLAPCSRSTSESTAALGCLVKDYFPEPVTVSWNSGALTSGVHTFPAVLQSSGLYSLSSVVTVPSSNFGTQTYTCNVDHKPSNTKVDKTVERKCCVECPPCPAPPVAGPSVFLFPPKPKDTLMISRTPEVTCVVVDVSHEDPEVQFNWYVDGVEVHNAKTKPREEQFNSTFRVVSVLTVVHQDWLNGKEYKCKVSNKGLPAPIEKTISKTKGQPREPQVYTLPPSREEMTKNQVSLTCLVKGFYPSDIAVEWESNGQPENNYKTTPPMLDSDGSFFLYSKLTVDKSRWQQGNVFSCSVMHEALHNHYTQKSLSLSPGK

SEQ ID NO: 57 - protein, 215 aa, Artificial Sequence
  Description of Artificial Sequence: Synthetic polypeptide
EIVMTQSPATLSVSPGERATLSCRASQSVDSNLAWYRQKPGQAPRLLIYGASTRATGIPARFSGSGSGTEFTLTISSLQSEDFAVYYCQQYINWPPITFGQGTRLEIKRTVAAPSVFIFPPSDEQLKSGTASVVCLLNNFYPREAKVQWKVDNALQSGNSQESVTEQDSKDSTYSLSSTLTLSKADYEKHKVYACEVTHQGLSSPVTKSFNRGEC

SEQ ID NO: 58 - protein, 451 aa, Artificial Sequence
  Description of Artificial Sequence: Synthetic polypeptide
QVQLVQSGAEVKKPGSSVKVSCKASGYTFTDYAMHWVRQAPGQGLEWMGLISIYSDHTNYNQKFQGRVTITADKSTSTAYMELSSLRSEDTAVYYCGRNNYGNYGWYFDVWGQGTTVTVSSASTKGPSVFPLAPSSKSTSGGTAALGCLVKDYFPEPVTVSWNSGALTSGVHTFPAVLQSSGLYSLSSVVTVPSSSLGTQTYICNVNHKPSNTKVDKKVEPKSCDKTHTCPPCPAPEAAGGPSVFLFPPKPKDTLMISRTPEVTCVVVDVSHEDPEVKFNWYVDGVEVHNAKTKPREEQYNSTYRVVSVLTVLHQDWLNGKEYKCKVSNKALPAPIEKTISKAKGQPREPQVYTLPPSREEMTKNQVSLTCLVKGFYPSDIAVEWESNGQPENNYKTTPPVLDSDGSFFLYSKLTVDKSRWQQGNVFSCSVMHEALHNHYTQKSLSLSPGK

SEQ ID NO: 59 - protein, 213 aa, Artificial Sequence
  Description of Artificial Sequence: Synthetic polypeptide
EIVLTQSPATLSLSPGERATLSCSASSSVSYMHWYQQKPGQAPRLLIYDTSKLASGIPARFSGSGSGTDYTLTISSLEPEDFAVYYCFQGSGYPYTFGQGTKLEIKRTVAAPSVFIFPPSDEQLKSGTASVVCLLNNFYPREAKVQWKVDNALQSGNSQESVTEQDSKDSTYSLSSTLTLSKADYEKHKVYACEVTHQGLSSPVTKSFNRGEC

SEQ ID NO: 60 - protein, 449 aa, Artificial Sequence
  Description of Artificial Sequence: Synthetic polypeptide
QVQLQQPGAELVRPGASVKLSCKASGYTFSNYLMNWVKQRPEQDLDWIGRIDPYDGDIDYNQNFKDKAILTVDKSSSTAYMQLSSLTSEDSAVYYCARGYGTAYGVDYWGQGTSVTVSSASTKGPSVFPLAPSSKSTSGGTAALGCLVKDYFPEPVTVSWNSGALTSGVHTFPAVLQSSGLYSLSSVVTVPSSSLGTQTYICNVNHKPSNTKVDKKVEPKSCDKTHTCPPCPAPELLGGPSVFLFPPKPKDTLMISRTPEVTCVVVDVSHEDPEVKFNWYVDGVEVHNAKTKPREEQYNSTYRVVSVLTVLHQDWLNGKEYKCKVSNKALPAPIEKTISKAKGQPREPQVYTLPPSREEMTKNQVSLTCLVKGFYPSDIAVEWESNGQPENNYKTTPPVLDSDGSFFLYSKLTVDKSRWQQGNVFSCSVMHEALHNHYTQKSLSLSPGK

SEQ ID NO: 61 - protein, 218 aa, Artificial Sequence
  Description of Artificial Sequence: Synthetic polypeptide
DIVLTQSPASLAVSLGQRATISCRASESVDNYGISFMNWFQQKPGQPPKLLIYAASRQGSGVPARFSGSGSGTDFSLNIHPMEEDDTAMYFCQQSKEVPWTFGGGTKLEIKRTVAAPSVFIFPPSDEQLKSGTASVVCLLNNFYPREAKVQWKVDNALQSGNSQESVTEQDSKDSTYSLSSTLTLSKADYEKHKVYACEVTHQGLSSPVTKSFNRGEC

SEQ ID NO: 62 - protein, 442 aa, Artificial Sequence
  Description of Artificial Sequence: Synthetic polypeptide
QVQLVQSGAEVKKPGASVKVSCKASGYTFTRYGISWVRQAPGQGLEWMGWISTYSGNTNYAQKLQGRVTMTTDTSTSTAYMELRSLRSDDTAVYYCARRQLYFDYWGQGTLVTVSSASTKGPSVFPLAPCSRSTSESTAALGCLVKDYFPEPVTVSWNSGALTSGVHTFPAVLQSSGLYSLSSVVTVPSSNFGTQTYTCNVDHKPSNTKVDKTVERKCCVECPPCPAPPVAGPSVFLFPPKPKDTLMISRTPEVTCVVVDVSHEDPEVQFNWYVDGVEVHNAKTKPREEQFNSTFRVVSVLTVVHQDWLNGKEYKCKVSNKGLPAPIEKTISKTKGQPREPQVYTLPPSREEMTKNQVSLTCLVKGFYPSDIAVEWESNGQPENNYKTTPPMLDSDGSFFLYSKLTVDKSRWQQGNVFSCSVMHEALHNHYTQKSLSLSPGK

SEQ ID NO: 63 - protein, 214 aa, Artificial Sequence
  Description of Artificial Sequence: Synthetic polypeptide
EIVMTQSPATLSVSPGERATLSCRASQSVSSNLAWFQQKPGQAPRPLIYDASTRATGVPARFSGSGSGTDFTLTISSLQSEDFAVYYCQQYDNWPLTFGGGTKVEIKRTVAAPSVFIFPPSDEQLKSGTASVVCLLNNFYPREAKVQWKVDNALQSGNSQESVTEQDSKDSTYSLSSTLTLSKADYEKHKVYACEVTHQGLSSPVTKSFNRGEC

SEQ ID NO: 64 - protein, 452 aa, Artificial Sequence
  Description of Artificial Sequence: Synthetic polypeptide
EVQLVQSGAEVKKPGASVKVSCKASGYTFKYYGMNWVRQAPGQGLERMGWINTYTGQSTYADDFKGRVTFTLDTSTSTAYMELSSLRSEDTAVYYCARDIYYYGSDFAMDYWGQGTTVTVSSASTKGPSVFPLAPSSKSTSGGTAALGCLVKDYFPEPVTVSWNSGALTSGVHTFPAVLQSSGLYSLSSVVTVPSSSLGTQTYICNVNHKPSNTKVDKKVEPKSCDKTHTCPPCPAPELLGGPSVFLFPPKPKDTLMISRTPEVTCVVVDVSHEDPEVKFNWYVDGVEVHNAKTKPREEQYNSTYRVVSVLTVLHQDWLNGKEYKCKVSNKALPAPIEKTISKAKGQPREPQVYTLPPSREEMTKNQVSLTCLVKGFYPSDIAVEWESNGQPENNYKTTPPVLDSDGSFFLYSKLTVDKSRWQQGNVFSCSVMHEALHNHYTQKSLSLSPGK

SEQ ID NO: 65 - protein, 214 aa, Artificial Sequence
  Description of Artificial Sequence: Synthetic polypeptide
DIQMTQSPSSLSASVGDRVTITCRASQDISNMLNWYQQKPGKAPKLLIYYTSRLKPGVPSRFSGSGSGTDYTFTISSLQPEDIATYFCQQGKTAPYTFGQGTKLEIKRTVAAPSVFIFPPSDEQLKSGTASVVCLLNNFYPREAKVQWKVDNALQSGNSQESVTEQDSKDSTYSLSSTLTLSKADYEKHKVYACEVTHQGLSSPVTKSFNRGEC

SEQ ID NO: 66 - protein, 449 aa, Artificial Sequence
  Description of Artificial Sequence: Synthetic polypeptide
EVQLVESGGGVVQPGRSLRLSCSASGFIFSRYDMSWVRQAPGKGLEWVAYISHGGAGTYYPDSVKGRFTISRDNSKNTLFLQMDSLRAEDTAVYYCARGGVYKGYFDVWGQGTPVTVSSASTKGPSVFPLAPSSKSTSGGTAALGCLVKDYFPEPVTVSWNSGALTSGVHTFPAVLQSSGLYSLSSVVTVPSSSLGTQTYICNVNHKPSNTKVDKKVEPKSCDKTHTCPPCPAPELLGGPSVFLFPPKPKDTLMISRTPEVTCVVVDVSHEDPEVKFNWYVDGVEVHNAKTKPREEQYNSTYRVVSVLTVLHQDWLNGKEYKCKVSNKALPAPIEKTISKAKGQPREPQVYTLPPSREEMTKNQVSLTCLVKGFYPSDIAVEWESNGQPENNYKTTPPVLDSDGSFFLYSKLTVDKSRWQQGNVFSCSVMHEALHNHYTQKSLSLSPGK

SEQ ID NO: 67 - protein, 214 aa, Artificial Sequence
  Description of Artificial Sequence: Synthetic polypeptide
DIQMTQSPSSLSASVGDRVTITCRASGNIHNYLTWYQQTPGKAPKLLIYNAKTLADGVPSRFSGSGSGTDYTFTISSLQPEDIATYYCQHFWSIPYTFGQGTKLQITRTVAAPSVFIFPPSDEQLKSGTASVVCLLNNFYPREAKVQWKVDNALQSGNSQESVTEQDSKDSTYSLSSTLTLSKADYEKHKVYACEVTHQGLSSPVTKSFNRGEC

SEQ ID NO: 68 - protein, 448 aa, Artificial Sequence
  Description of Artificial Sequence: Synthetic polypeptide
QVQLVESGGGVVQPGRSLRLSCAASGFTFSVYGMNWVRQAPGKGLEWVAIIWYDGDNQYYADSVKGRFTISRDNSKNTLYLQMNGLRAEDTAVYYCARDLRTGPFDYWGQGTLVTVSSASTKGPSVFPLAPSSKSTSGGTAALGCLVKDYFPEPVTVSWNSGALTSGVHTFPAVLQSSGLYSLSSVVTVPSSSLGTQTYICNVNHKPSNTKVDKRVEPKSCDKTHTCPPCPAPELLGGPSVFLFPPKPKDTLMISRTPEVTCVVVDVSHEDPEVKFNWYVDGVEVHNAKTKPREEQYNSTYRVVSVLTVLHQDWLNGKEYKCKVSNKALPAPIEKTISKAKGQPREPQVYTLPPSREEMTKNQVSLTCLVKGFYPSDIAVEWESNGQPENNYKTTPPVLDSDGSFFLYSKLTVDKSRWQQGNVFSCSVMHEALHNHYTQKSLSLSPGK

SEQ ID NO: 69 - protein, 214 aa, Artificial Sequence
  Description of Artificial Sequence: Synthetic polypeptide
EIVLTQSPDFQSVTPKEKVTITCRASQSIGSSLHWYQQKPDQSPKLLIKYASQSFSGVPSRFSGSGSGTDFTLTINSLEAEDAAAYYCHQSSSLPFTFGPGTKVDIKRTVAAPSVFIFPPSDEQLKSGTASVVCLLNNFYPREAKVQWKVDNALQSGNSQESVTEQDSKDSTYSLSSTLTLSKADYEKHKVYACEVTHQGLSSPVTKSFNRGEC

SEQ ID NO: 70 - protein, 450 aa, Artificial Sequence
  Description of Artificial Sequence: Synthetic polypeptide
QVQLVESGGGVVQPGRSLRLSCAASGFTFSSYGMHWVRQAPGKGLEWVAVIWYDGSNEYYADSVKGRFTISRDNSKNTLYLQMNSLRAEDTAVYYCARDRGYTSSWYPDAFDIWGQGTMVTVSSASTKGPSVFPLAPCSRSTSESTAALGCLVKDYFPEPVTVSWNSGALTSGVHTFPAVLQSSGLYSLSSVVTVPSSNFGTQTYTCNVDHKPSNTKVDKTVERKCCVECPPCPAPPVAGPSVFLFPPKPKDTLMISRTPEVTCVVVDVSHEDPEVQFNWYVDGVEVHNAKTKPREEQFNSTFRVVSVLTVVHQDWLNGKEYKCKVSNKGLPAPIEKTISKTKGQPREPQVYTLPPSREEMTKNQVSLTCLVKGFYPSDIAVEWESNGQPENNYKTTPPMLDSDGSFFLYSKLTVDKSRWQQGNVFSCSVMHEALHNHYTQKSLSLSPGK

SEQ ID NO: 71 - protein, 217 aa, Artificial Sequence
  Description of Artificial Sequence: Synthetic polypeptide
QSVLTQPPSVSGAPGQRVTISCTGSSSNTGAGYDVHWYQQVPGTAPKLLIYGSGNRPSGVPDRFSGSKSGTSASLAITGLQAEDEADYYCQSYDSSLSGWVFGGGTRLTVLGQPKAAPSVTLFPPSSEELQANKATLVCLISDFYPGAVTVAWKADSSPVKAGVETTTPSKQSNNKYAASSYLSLTPEQWKSHRSYSCQVTHEGSTVEKTVAPTECS

SEQ ID NO: 72 - protein, 447 aa, Artificial Sequence
  Description of Artificial Sequence: Synthetic polypeptide
EVQLVQSGAEVKKPGESLKISCKGSGYSFSNYWIGWVRQMPGKGLEWMGIIDPSNSYTRYSPSFQGQVTISADKSISTAYLQWSSLKASDTAMYYCARWYYKPFDVWGQGTLVTVSSASTKGPSVFPLAPSSKSTSGGTAALGCLVKDYFPEPVTVSWNSGALTSGVHTFPAVLQSSGLYSLSSVVTVPSSSLGTQTYICNVNHKPSNTKVDKKVEPKSCDKTHTCPPCPAPELLGGPSVFLFPPKPKDTLMISRTPEVTCVVVDVSHEDPEVKFNWYVDGVEVHNAKTKPREEQYNSTYRVVSVLTVLHQDWLNGKEYKCKVSNKALPAPIEKTISKAKGQPREPQVYTLPPSRDELTKNQVSLTCLVKGFYPSDIAVEWESNGQPENNYKTTPPVLDSDGSFFLYSKLTVDKSRWQQGNVFSCSVMHEALHNHYTQKSLSLSPGK

SEQ ID NO: 73 - protein, 217 aa, Artificial Sequence
  Description of Artificial Sequence: Synthetic polypeptide
QSVLTQPPSVSGAPGQRVTISCTGSSSNIGSGYDVHWYQQLPGTAPKLLIYGNSKRPSGVPDRFSGSKSGTSASLAITGLQSEDEADYYCASWTDGLSLVVFGGGTKLTVLGQPKAAPSVTLFPPSSEELQANKATLVCLISDFYPGAVTVAWKADSSPVKAGVETTTPSKQSNNKYAASSYLSLTPEQWKSHRSYSCQVTHEGSTVEKTVAPTECS

SEQ ID NO: 74 - protein, 449 aa, Artificial Sequence
  Description of Artificial Sequence: Synthetic polypeptide
QVQLVQSGAEVKKPGSSVKVSCKASGYTFTDQTIHWMRQAPGQGLEWIGYIYPRDDSPKYNENFKGKVTITADKSTSTAYMELSSLRSEDTAVYYCAIPDRSGYAWFIYWGQGTLVTVSSASTKGPSVFPLAPSSKSTSGGTAALGCLVKDYFPEPVTVSWNSGALTSGVHTFPAVLQSSGLYSLSSVVTVPSSSLGTQTYICNVNHKPSNTKVDKRVEPKSCDKTHTCPPCPAPEAAGGPSVFLFPPKPKDTLMISRTPEVTCVVVDVSHEDPEVKFNWYVDGVEVHNAKTKPREEQYNSTYRVVSVLTVLHQDWLNGKEYKCKVSNKALPAPIEKTISKAKGQPREPQVYTLPPSREEMTKNQVSLTCLVKGFYPSDIAVEWESNGQPENNYKTTPPVLDSDGSFFLYSKLTVDKSRWQQGNVFSCSVMHEALHNHYTQKSLSLSPG

SEQ ID NO: 75 - protein, 214 aa, Artificial Sequence
  Description of Artificial Sequence: Synthetic polypeptide
DIQMTQSPSSLSASVGDRVTITCKASRDVAIAVAWYQQKPGKVPKLLIYWASTRHTGVPSRFSGSGSRTDFTLTISSLQPEDVADYFCHQYSSYPFTFGSGTKLEIKRTVAAPSVFIFPPSDEQLKSGTASVVCLLNNFYPREAKVQWKVDNALQSGNSQESVTEQDSKDSTYSLSSTLTLSKADYEKHKVYACEVTHQGLSSPVTKSFNRGEC

SEQ ID NO: 76 - protein, 446 aa, Artificial Sequence
  Description of Artificial Sequence: Synthetic polypeptide
QVQLVQSGAEVKKPGASVKVSCKASGYIFITYWMTWVRQAPGQGLEWMGQIFPASGSADYNEKFEGRVTMTTDTSTSTAYMELRSLRSDDTAVYYCARGGGGFAYWGQGTLVTVSSASTKGPSVFPLAPSSKSTSGGTAALGCLVKDYFPEPVTVSWNSGALTSGVHTFPAVLQSSGLYSLSSVVTVPSSSLGTQTYICNVNHKPSNTKVDKRVEPKSCDKTHTCPPCPAPEAAGGPSVFLFPPKPKDTLMISRTPEVTCVVVDVSHEDPEVKFNWYVDGVEVHNAKTKPREEQYNSTYRVVSVLTVLHQDWLNGKEYKCKVSNKALPAPIEKTISKAKGQPREPQVYTLPPSREEMTKNQVSLTCLVKGFYPSDIAVEWESNGQPENNYKTTPPVLDSDGSFFLYSKLTVDKSRWQQGNVFSCSVMHEALHNHYTQKSLSLSPGK

SEQ ID NO: 77 - protein, 214 aa, Artificial Sequence
  Description of Artificial Sequence: Synthetic polypeptide
DIQMTQSPSSLSASVGDRVTITCRTSENIYSYLAWYQQKPGKAPKLLIYNAKTLAEGVPSRFSGSGSGTDFTLTISSLQPEDFATYYCQHHYGIPFTFGQGTKVEIKRTVAAPSVFIFPPSDEQLKSGTASVVCLLNNFYPREAKVQWKVDNALQSGNSQESVTEQDSKDSTYSLSSTLTLSKADYEKHKVYACEVTHQGLSSPVTKSFNRGEC

SEQ ID NO: 78 - protein, 449 aa, Artificial Sequence
  Description of Artificial Sequence: Synthetic polypeptide
QVQLQESGPGLVRPSQTLSLTCTVSGYSITSDHAWSWVRQPPGRGLEWIGYISYSGITTYNPSLKSRVTMLRDTSKNQFSLRLSSVTAADTAVYYCARSLARTTAMDYWGQGSLVTVSSASTKGPSVFPLAPSSKSTSGGTAALGCLVKDYFPEPVTVSWNSGALTSGVHTFPAVLQSSGLYSLSSVVTVPSSSLGTQTYICNVNHKPSNTKVDKKVEPKSCDKTHTCPPCPAPELLGGPSVFLFPPKPKDTLMISRTPEVTCVVVDVSHEDPEVKFNWYVDGVEVHNAKTKPREEQYNSTYRVVSVLTVLHQDWLNGKEYKCKVSNKALPAPIEKTISKAKGQPREPQVYTLPPSRDELTKNQVSLTCLVKGFYPSDIAVEWESNGQPENNYKTTPPVLDSDGSFFLYSKLTVDKSRWQQGNVFSCSVMHEALHNHYTQKSLSLSPGK

SEQ ID NO: 79 - protein, 214 aa, Artificial Sequence [sequence omitted]

SEQ ID NO: 80 - protein, 448 aa, Artificial Sequence
  Description of Artificial Sequence: Synthetic polypeptide
DVQLQESGPGLVKPSQSLSLTCSVTGYSITSGYYWNWIRQFPGNKLEWMGYISYDGTNNYNPSLKNRISITRDTSKHQFFLKLNSVTTEDTATYYCARSFYNNYFDFWGQGTTLTVSSASTKGPSVFPLAPSSKSTSGGTAALGCLVKDYFPEPVTVSWNSGALTSGVHTFPAVLQSSGLYSLSSVVTVPSSSLGTQTYICNVNHKPSNTKVDKKVEPKSCDKTHTCPPCPAPELLGGPSVFLFPPKPKDTLMISRTPEVTCVVVDVSHEDPEVKFNWYVDGVEVHNAKTKPREEQYNSTYRVVSVLTVLHQDWLNGKEYKCKVSNKALPAPIEKTISKAKGQPREPQVYTLPPSREEMTKNQVSLTCLVKGFYPSDIAVEWESNGQPENNYKTTPPVLDSDGSFFLYSKLTVDKSRWQQGNVFSCSVMHEALHNHYTQKSLSLSPGK

SEQ ID NO: 81 - protein, 213 aa, Artificial Sequence
  Description of Artificial Sequence: Synthetic polypeptide
DIQMTQSPSSLSASLGGKVTITCKASQDIDKYIAWYQHKPGKGPRLLIHYTSTLQPGIPSRFSGSGSGRDYSFNISNLEPEDIATYYCLQYDNLRTFGGGTKLEIKRTVAAPSVFIFPPSDEQLKSGTASVVCLLNNFYPREAKVQWKVDNALQSGNSQESVTEQDSKDSTYSLSSTLTLSKADYEKHKVYACEVTHQGLSSPVTKSFNRGEC

SEQ ID NO: 82 - protein, 449 aa, Artificial Sequence
  Description of Artificial Sequence: Synthetic polypeptide
QVQLVQSGAEVKKPGASVKVSCKASGLTIEDYYMHWVRQAPGQGLEWMGWIDPENGDTEYGPKFQGRVTMTRDTSINTAYMELSRLRSDDTAVYYCAVHNAHYGTWFAYWGQGTLVTVSSASTKGPSVFPLAPSSKSTSGGTAALGCLVKDYFPEPVTVSWNSGALTSGVHTFPAVLQSSGLYSLSSVVTVPSSSLGTQTYICNVNHKPSNTKVDKKVEPKSCDKTHTCPPCPAPELLGGPSVFLFPPKPKDTLMISRTPEVTCVVVDVSHEDPEVKFNWYVDGVEVHNAKTKPREEQYNSTYRVVSVLTVLHQDWLNGKEYKCKVSNKALPAPIEKTISKAKGQPREPQVYTLPPSRDELTKNQVSLTCLVKGFYPSDIAVEWESNGQPENNYKTTPPVLDSDGSFFLYSKLTVDKSRWQQGNVFSCSVMHEALHNHYTQKSLSLSPG

SEQ ID NO: 83 - protein, 219 aa, Artificial Sequence
  Description of Artificial Sequence: Synthetic polypeptide
DVVMTQSPLSLPVTLGQPASISCRSSQSLLHSSGNTYLEWYQQRPGQSPRPLIYKISTRFSGVPDRFSGSGSGTDFTLKISRVEAEDVGVYYCFQGSHVPYTFGGGTKVEIKRTVAAPSVFIFPPSDEQLKSGTASVVCLLNNFYPREAKVQWKVDNALQSGNSQESVTEQDSKDSTYSLSSTLTLSKADYEKHKVYACEVTHQGLSSPVTKSFNRGEC

SEQ ID NO: 84 - protein, 449 aa, Artificial Sequence
  Description of Artificial Sequence: Synthetic polypeptide
EVQLVQSGAEVKKPGSSVKVSCKASGFTFTDYYIHWVKQAPGQGLEWIGLVYPYIGGTNYNQKFKGKATLTVDTSTTTAYMEMSSLRSEDTAVYYCARGDNKYDAMDYWGQGTTVTVSSASTKGPSVFPLAPSSKSTSGGTAALGCLVKDYFPEPVTVSWNSGALTSGVHTFPAVLQSSGLYSLSSVVTVPSSSLGTQTYICNVNHKPSNTKVDKKVEPKSCDKTHTCPPCPAPELLGGPSVFLFPPKPKDTLMISRTPEVTCVVVDVSHEDPEVKFNWYVDGVEVHNAKTKPREEQYNSTYRVVSVLTVLHQDWLNGKEYKCKVSNKALPAPIEKTISKAKGQPREPQVYTLPPSREEMTKNQVSLTCLVKGFYPSDIAVEWESNGQPENNYKTTPPVLDSDGSFFLYSKLTVDKSRWQQGNVFSCSVMHEALHNHYTQKSLSLSPGK

SEQ ID NO: 85 - protein, 217 aa, Artificial Sequence
  Description of Artificial Sequence: Synthetic polypeptide
DIVLTQSPDSLAVSLGERATINCRASQSVSTSSYSYMHWYQQKPGQPPKLLIKYASSLESGVPDRFSGSGSGTDFTLTISSLQAEDVAVYYCEQSWEIRTFGGGTKVEIKRTVAAPSVFIFPPSDEQLKSGTASVVCLLNNFYPREAKVQWKVDNALQSGNSQESVTEQDSKDSTYSLSSTLTLSKADYEKHKVYACEVTHQGLSSPVTKSFNRGEC

SEQ ID NO: 86 - protein, 450 aa, Artificial Sequence
  Description of Artificial Sequence: Synthetic polypeptide
EVQLVQSGAEVKKPGASVKVSCKASGYKFSSYWIEWVKQAPGQGLEWIGEILPGSDTTNYNEKFKDRATFTSDTSINTAYMELSRLRSDDTAVYYCARDRGNYRAWFGYWGQGTLVTVSSASTKGPSVFPLAPSSKSTSGGTAALGCLVKDYFPEPVTVSWNSGALTSGVHTFPAVLQSSGLYSLSSVVTVPSSSLGTQTYICNVIVHKPSNTKVDKKVEPKSCDKTHTCPPCPAPELLGGPSVFLFPPKPKDTLMISRTPEVTCVVVDVSHEDPEVKFNWYVDGVEVHNAKTKPREEQYNSTYRVVSVLTVLHQDWLNGKEYKCKVSNKALPAPIEKTISKAKGQPREPQVYTLPPSREEMTKNQVSLTCLVKGFYPSDIAVEWESNGQPENNYKTTPPVLDSDGSFFLYSKLTVDKSRWQQGNVFSCSVMHEALHNHYTQKSLSLSPG

SEQ ID NO: 87 - protein, 214 aa, Artificial Sequence
  Description of Artificial Sequence: Synthetic polypeptide
DIQMTQSPSSLSASVGDRVTITCRASQDISNYLNWYQQKPGGAVKFLIYYTSRLHSGVPSRFSGSGSGTDYTLTISSLQPEDFATYFCQQGEALPWTFGGGTKVEIKRTVAAPSVFIFPPSDEQLKSGTASVVCLLNNFYPREAKVQWKVDNALQSGNSQESVTEQDSKDSTYSLSSTLTLSKADYEKHKVYACEVTHQGLSSPVTKSFNRGEA

SEQ ID NO: 88 - protein, 449 aa, Artificial Sequence [sequence omitted]

SEQ ID NO: 89 - protein, 215 aa, Artificial Sequence
  Description of Artificial Sequence: Synthetic polypeptide
DIQLTQSPSSLSASVGDRVTMTCSASSSVSSSYLYWYQQKPGKAPKLWIYSTSNLASGVPARFSGSGSGTDFTLTISSLQPEDSASYFCHQWNRYPYTFGGGTRLEIKRTVAAPSVFIFPPSDEQLKSGTASVVCLLNNFYPREAKVQWKVDNALQSGNSQESVTEQDSKDSTYSLSSTLTLSKADYEKHKVYACEVTHQGLSSPVTKSFNRGEC

SEQ ID NO: 90 - protein, 447 aa, Artificial Sequence
  Description of Artificial Sequence: Synthetic polypeptide
EVQLQESGPGLVKPSDTLSLTCAVSGYSIASGYYWNWIRQPPGKGLEWMGYISYDGSNNYNPSLGNRITISRDTSKNQVSLKLSSVTAVDTAVYYCVKTLPYYFDYWGQGTTVTVSSASTKGPSVFPLAPSSKSTSGGTAALGCLVKDYFPEPVTVSWNSGALTSGVHTFPAVLQSSGLYSLSSVVTVPSSSLGTQTYICNVNHKPSNTKVDKKVEPKSCDKTHTCPPCPAPELLGGPSVFLFPPKPKDTLMISRTPEVTCVVVDVSHEDPEVKFNWYVDGVEVHNAKTKPREEQYNSTYRVVSVLTVLHQDWLNGKEYKCKVSNKALPAPIEKTISKAKGQPREPQVYTLPPSREEMTKNQVSLTCLVKGFYPSDIAVEWESNGQPENNYKTTPPVLDSDGSFFLYSKLTVDKSRWQQGNVFSCSVMHEALHNHYTQKSLSLSPGK

SEQ ID NO: 91 - protein, 214 aa, Artificial Sequence
  Description of Artificial Sequence: Synthetic polypeptide
DIQMTQTPSSLSASVGDRVTITCRASQDISNYLNWYQQKPGKAPKLLIFYTSRLHSGVPSRFSGSGSGTDYTLTISSLQPEDFATYYCQQGNTLPLTFGQGTKLEIKRTVAAPSVFIFPPSDEQLKSGTASVVCLLNNFYPREAKVQWKVDNALQSGNSQESVTEQDSKDSTYSLSSTLTLSKADYEKHKVYACEVTHQGLSSPVTKSFNRGEC

SEQ ID NO: 92 - protein, 447 aa, Artificial Sequence
  Description of Artificial Sequence: Synthetic polypeptide
EVQLVQSGAEVKKPGSSVKVSCKASGFNIKDTYMHWVRQAPGQGLEWIGRIDPANGNTKYDPKFQGRATITADTSTNTAYMELSSLRSEDTAVYYCARGGPAWFVYWGQGTLVTVSSASTKGPSVFPLAPSSKSTSGGTAALGCLVKDYFPEPVTVSWNSGALTSGVHTFPAVLQSSGLYSLSSVVTVPSSSLGTQTYICNVNHKPSNTKVDKKVEPKSCDKTHTCPPCPAPELLGGPSVFLFPPKPKDTLMISRTPEVTCVVVDVSHEDPEVKFNWYVDGVEVHNAKTKPREEQYNSTYRVVSVLTVLHQDWLNGKEYKCKVSNKALPAPIEKTISKAKGQPREPQVYTLPPSREEMTKNQVSLTCLVKGFYPSDIAVEWESNGQPENNYKTTPPVLDSDGSFFLYSKLTVDKSRWQQGNVFSCSVMHEALHNHYTQKSLSLSPGK

SEQ ID NO: 93 - protein, 214 aa, Artificial Sequence
  Description of Artificial Sequence: Synthetic polypeptide
DIQMTQSPSSLSASVGDRVTITCRASQDISNYLNWYQQKPGKAPKLLIYYTSRLRSGLPSRFSGSGSGTDYTLTISSLQPEDFATYYCQQGNTLPWTFGGGTKVEIKRTVAAPSVFIFPPSDEQLKSGTASVVCLLNNFYPREAKVQWKVDNALQSGNSQESVTEQDSKDSTYSLSSTLTLSKADYEKHKVYACEVTHQGLSSPVTKSFNRGEC

SEQ ID NO: 94 - protein, 443 aa, Artificial Sequence
  Description of Artificial Sequence: Synthetic polypeptide
EVQLVESGGGLVQPGGSLRLSCAVSGFSLTSYGVHWVRQAPGKGLEWLGVIWSGGSTDYNAAFISRLTISKDNSKSTVYLQMNSLRAEDTAVYYCAREEFDYWGQGTTVTVSSASTKGPSVFPLAPSSKSTSGGTAALGCLVKDYFPEPVTVSWNSGALTSGVHTFPAVLQSSGLYSLSSVVTVPSSSLGTQTYICNVNHKPSNTKVDKKVEPKSCDKTHTCPPCPAPELLGGPSVFLFPPKPKDTLMISRTPEVTCVVVDVSHEDPEVKFNWYVDGVEVHNAKTKPREEQYNSTYRVVSVLTVLHQDWLNGKEYKCKVSNKALPAPIEKTISKAKGQPREPQVYTLPPSREEMTKNQVSLTCLVKGFYPSDIAVEWESNGQPENNYKTTPPVLDSDGSFFLYSKLTVDKSRWQQGNVFSCSVMHEALHNHYTQKSLSLSPGK

SEQ ID NO: 95 - protein, 214 aa, Artificial Sequence
  Description of Artificial Sequence: Synthetic polypeptide
DIQMTQSPSSLSASVGDRVTITCRASQDISNYLNWFQQKPGKAPKLLIYYTSRLHSGVPSRFSGSGSGTDYTLTISSLQPEDFATYYCQQGYTLPPTFGGGTKVEIKRTVAAPSVFIFPPSDEQLKSGTASVVCLLNNFYPREAKVQWKVDNALQSGNSQESVTEQDSKDSTYSLSSTLTLSKADYEKHKVYACEVTHQGLSSPVTKSFNRGEC

SEQ ID NO: 96 - protein, 452 aa, Artificial Sequence
  Description of Artificial Sequence: Synthetic polypeptide
QVQLVQSGSELKKPGASVKVSCKASGYTFTDYSMHWVRQAPGQGLKWMGWINTETGEPTYADDFKGRFVFSLDTSVSTAYLQISSLKAEDTAVYYCANPYYDYVSYYAMDYWGQGTTVTVSSASTKGPSVFPLAPSSKSTSGGTAALGCLVKDYFPEPVTVSWNSGALTSGVHTFPAVLQSSGLYSLSSVVTVPSSSLGTQTYICNVNHKPSNTKVDKKVEPKSCDKTHTCPPCPAPEAAGGPSVFLFPPKPKDTLMISRTPEVTCVVVDVSHEDPEVKFNWYVDGVEVHNAKTKPREEQYNSTYRVVSVLTVLHQDWLNGKEYKCKVSNKALPAPIEKTISKAKGQPREPQVYTLPPSREEMTKNQVSLTCLVKGFYPSDIAVEWESNGQPENNYKTTPPVLDSDGSFFLYSKLTVDKSRWQQGNVFSCSVMHEALHNHYTQKSLSLSPGK

SEQ ID NO: 97 - protein, 214 aa, Artificial Sequence
  Description of Artificial Sequence: Synthetic polypeptide
DIQMTQSPSSLSASVGDRVTITCKASQDVSTAVAWYQQKPGKAPKLLIYSASYLYTGVPSRFSGSGSGTDFTFTISSLQPEDIATYYCQQHYSTPRTFGQGTKLEIKRTVAAPSVFIFPPSDEQLKSGTASVVCLLNNFYPREAKVQWKVDNALQSGNSQESVTEQDSKDSTYSLSSTLTLSKADYEKHKVYACEVTHQGLSSPVTKSFNRGEC

SEQ ID NO: 98 - protein, 443 aa, Artificial Sequence
  Description of Artificial Sequence: Synthetic polypeptide
EVQLVQSGAEVKKPGESLRISCKGSGYTFTTYWMHWVRQATGQGLEWMGNIYPGTGGSNFDEKFKNRVTITADKSTSTAYMELSSLRSEDTAVYYCTRWTTGTGAYWGQGTTVTVSSASTKGPSVFPLAPCSRSTSESTAALGCLVKDYFPEPVTVSWNSGALTSGVHTFPAVLQSSGLYSLSSVVTVPSSSLGTKTYTCNVDHKPSNTKVDKRVESKYGPPCPPCPAPEFLGGPSVFLFPPKPKDTLMISRTPEVTCVVVDVSQEDPEVQFNWYVDGVEVHNAKTKPREEQFNSTYRVVSVLTVLHQDWLNGKEYKCKVSNKGLPSSIEKTISKAKGQPREPQVYTLPPSQEEMTKNQVSLTCLVKGFYPSDIAVEWESNGQPENNYKTTPPVLDSDGSFFLYSRLTVDKSRWQEGNVFSCSVMHEALHNHYTQKSLSLSLG

SEQ ID NO: 99 - protein, 220 aa, Artificial Sequence
  Description of Artificial Sequence: Synthetic polypeptide
EIVLTQSPATLSLSPGERATLSCKSSQSLLDSGNQKNFLTWYQQKPGQAPRLLTYWASTRESGVPSRFSGSGSGTDFTFTISSLEAEDAATYYCQNDYSYPYTFGQGTKVEIKRTVAAPSVFIFPPSDEQLKSGTASVVCLLNNFYPREAKVQWKVDNALQSGNSQESVTEQDSKDSTYSLSSTLTLSKADYEKHKVYACEVTHQGLSSPVTKSFNRGEC

SEQ ID NO: 100 - protein, 447 aa, Artificial Sequence
  Description of Artificial Sequence: Synthetic polypeptide
QVQLVQSGVEVKKPGASVKVSCKASGYTFTNYYMYWVRQAPGQGLEWMGGINPSNGGTNFNEKFKNRVTLTTDSSTTTAYMELKSLQFDDTAVYYCARRDYRFDMGFDYWGQGTTVTVSSASTKGPSVFPLAPCSRSTSESTAALGCLVKDYFPEPVTVSWNSGALTSGVHTFPAVLQSSGLYSLSSVVTVPSSSLGTKTYTCNVDHKPSNTKVDKRVESKYGPPCPPCPAPEFLGGPSVFLFPPKPKDTLMISRTPEVTCVVVDVSQEDPEVQFNWYVDGVEVHNAKTKPREEQFNSTYRVVSVLTVLHQDWLNGKEYKCKVSNKGLPSSIEKTISKAKGQPREPQVYTLPPSQEEMTKNQVSLTCLVKGFYPSDIAVEWESNGQPENNYKTTPPVLDSDGSFFLYSRLTVDKSRWQEGNVFSCSVMHEALHNHYTQKSLSLSLGK

SEQ ID NO: 101 - protein, 218 aa, Artificial Sequence
  Description of Artificial Sequence: Synthetic polypeptide
EIVLTQSPATLSLSPGERATLSCRASKGVSTSGYSYLHWYQQKPGQAPRLLIYLASYLESGVPARFSGSGSGTDFTLTISSLEPEDFAVYYCQHSRDLPLTFGGGTKVEIKRTVAAPSVFIFPPSDEQLKSGTASVVCLLNNFYPREAKVQWKVDNALQSGNSQESVTEQDSKDSTYSLSSTLTLSKADYEKHKVYACEVTHQGLSSPVTKSFNRGEC

SEQ ID NO: 102 - protein, 448 aa, Artificial Sequence
  Description of Artificial Sequence: Synthetic polypeptide
EIQLVQSGAEVKKPGSSVKVSCKASGYTFTHYGMNWVRQAPGQGLEWVGWVNTYTGEPTYADDFKGRLTFTLDTSTSTAYMELSSLRSEDTAVYYCTREGEGLGFGDWGQGTTVTVSSASTKGPSVFPLAPSSKSTSGGTAALGCLVKDYFPEPVTVSWNSGALTSGVHTFPAVLQSSGLYSLSSVVTVPSSSLGTQTYICNVNHKPSNTKVDKKVEPKSCDKTHTCPPCPAPEAAGGPSVFLFPPKPKDTLMISRTPEVTCVVVDVSHEDPEVKFNWYVDGVEVHNAKTKPREEQYNSTYRVVSVLTVLHQDWLNGKEYKCKVSNKALPAPIEKTISKAKGQPREPQVYTLPPSREEMTKNQVSLTCLVKGFYPSDIAVEWESNGQPENNYKTTPPVLDSDGSFFLYSKLTVDKSRWQQGNVFSCSVMHEALHNHYTQKSLSLSPGK

SEQ ID NO: 103 - protein, 219 aa, Artificial Sequence
  Description of Artificial Sequence: Synthetic polypeptide
DVVMTQSPLSLPVTPGEPASISCRSSQSIVHSHGDTYLEWYLQKPGQSPQLLIYKVSNRFSGVPDRFSGSGSGTDFTLKISRVEAEDVGVYYCFQGSHIPVTFGQGTKLEIKRTVAAPSVFIFPPSDEQLKSGTASVVCLLNNFYPREAKVQWKVDNALQSGNSQESVTEQDSKDSTYSLSSTLTLSKADYEKHKVYACEVTHQGLSSPVTKSFNRGEC

SEQ ID NO: 104 - protein, 440 aa, Artificial Sequence
  Description of Artificial Sequence: Synthetic polypeptide
QVQLVESGGGVVQPGRSLRLDCKASGITFSNSGMHWVRQAPGKGLEWVAVIWYDGSKRYYADSVKGRFTISRDNSKNTLFLQMNSLRAEDTAVYYCATNDDYWGQGTLVTVSSASTKGPSVFPLAPCSRSTSESTAALGCLVKDYFPEPVTVSWNSGALTSGVHTFPAVLQSSGLYSLSSVVTVPSSSLGTKTYTCNVDHKPSNTKVDKRVESKYGPPCPPCPAPEFLGGPSVFLFPPKPKDTLMISRTPEVTCVVVDVSQEDPEVQFNWYVDGVEVHNAKTKPREEQFNSTYRVVSVLTVLHQDWLNGKEYKCKVSNKGLPSSIEKTISKAKGQPREPQVYTLPPSQEEMTKNQVSLTCLVKGFYPSDIAVEWESNGQPENNYKTTPPVLDSDGSFFLYSRLTVDKSRWQEGNVFSCSVMHEALHNHYTQKSLSLSLGK

SEQ ID NO: 105 - protein, 214 aa, Artificial Sequence
  Description of Artificial Sequence: Synthetic polypeptide
EIVLTQSPATLSLSPGERATLSCRASQSVSSYLAWYQQKPGQAPRLLIYDASNRATGIPARFSGSGSGTDFTLTISSLEPEDFAVYYCQQSSNWPRTFGQGTKVEIKRTVAAPSVFIFPPSDEQLKSGTASVVCLLNNFYPREAKVQWKVDNALQSGNSQESVTEQDSKDSTYSLSSTLTLSKADYEKHKVYACEVTHQGLSSPVTKSFNRGEC

SEQ ID NO: 106 - protein, 452 aa, Artificial Sequence
  Description of Artificial Sequence: Synthetic polypeptide
EVTLRESGPALVKPTQTLTLTCTFSGFSLSTYGMGVGWIRQPPGKALEWLANIWWDDDKYYNPSLKNRLTISKDTSKNQVVLTMTNMDPVDTATYYCARIESSGPKYSFDYWGQGTMVTVSSASTKGPSVFPLAPSSKSTSGGTAALGCLVKDYFPEPVTVSWNSGALTSGVHTFPAVLQSSGLYSLSSVVTVPSSSLGTQTYICNVNHKPSNTKVDKKVEPKSCDKTHTCPPCPAPELLGGPSVFLFPPKPKDTLMISRTPEVTCVVVDVSHEDPEVKFNWYVDGVEVHNAKTKPREEQYNSTYRVVSVLTVLHQDWLNGKEYKCKVSNKALPAPIEKTISKAKGQPREPQVYTLPPSREEMTKNQVSLTCLVKGFYPSDIAVEWESNGQPENNYKTTPPVLDSDGSFFLYSKLTVDKSRWQQGNVFSCSVMHEALHNHYTQKSLSLSPGK

SEQ ID NO: 107 - protein, 217 aa, Artificial Sequence
  Description of Artificial Sequence: Synthetic polypeptide
EIVLTQSPGTLSLSPGERATLSCRASSGSIWYSFVSWYQQKPGQAPRLLIYADDQRASGIPDRFSGSGSGTDFTLTISRLEPEDFAVYYCQSYGINIDVVFGGGTKVEIKRTVAAPSVFIFPPSDEQLKSGTASVVCLLNNFYPREAKVQWKVDNALQSGNSQESVTEQDSKDSTYSLSSTLTLSKADYEKHKVYACEVTHQGLSSPVTKSFNRGEC

SEQ ID NO: 108 - protein, 448 aa, Artificial Sequence
  Description of Artificial Sequence: Synthetic polypeptide
EVQLVESGGGLVQPGGSLRLSCAASGFTFSDSWIHWVRQAPGKGLEWVAWISPYGGSTYYADSVKGRFTISADTSKNTAYLQMNSLRAEDTAVYYCARRHWPGGFDYWGQGTLVTVSAASTKGPSVFPLAPSSKSTSGGTAALGCLVKDYFPEPVTVSWNSGALTSGVHTFPAVLQSSGLYSLSSVVTVPSSSLGTQTYICNVNHKPSNTKVDKKVEPKSCDKTHTCPPCPAPELLGGPSVFLFPPKPKDTLMISRTPEVTCVVVDVSHEDPEVKFNWYVDGVEVHNAKTKPREEQYASTYRVVSVLTVLHQDWLNGKEYKCKVSNKALPAPIEKTISKAKGQPREPQVYTLPPSREEMTKNQVSLTCLVKGFYPSDIAVEWESNGQPENNYKTTPPVLDSDGSFFLYSKLTVDKSRWQQGNVFSCSVMHEALHNHYTQKSLSLSPGK

SEQ ID NO: 109 - protein, 214 aa, Artificial Sequence
  Description of Artificial Sequence: Synthetic polypeptide
DIQMTQSPSSLSASVGDRVTITCRASQDVSTAVAWYQQKPGKAPKLLIYSASFLYSGVPSRFSGSGSGTDFTLTISSLQPEDFATYYCQQYLYHPATFGQGTKVEIKRTVAAPSVFIFPPSDEQLKSGTASVVCLLNNFYPREAKVQWKVDNALQSGNSQESVTEQDSKDSTYSLSSTLTLSKADYEKHKVYACEVTHQGLSSPVTKSFNRGEC

SEQ ID NO: 110 - protein, 450 aa, Artificial Sequence
  Description of Artificial Sequence: Synthetic polypeptide
EVQLLESGGGLVQPGGSLRLSCAASGFTFSSYIMMWVRQAPGKGLEWVSSIYPSGGITFYADTVKGRFTISRDNSKNTLYLQMNSLRAEDTAVYYCARIKLGTVTTVDYWGQGTLVTVSSASTKGPSVFPLAPSSKSTSGGTAALGCLVKDYFPEPVTVSWNSGALTSGVHTFPAVLQSSGLYSLSSVVTVPSSSLGTQTYICNVNHKPSNTKVDKRVEPKSCDKTHTCPPCPAPELLGGPSVFLFPPKPKDTLMISRTPEVTCVVVDVSHEDPEVKFNWYVDGVEVHNAKTKPREEQYNSTYRVVSVLTVLHQDWLNGKEYKCKVSNKALPAPIEKTISKAKGQPREPQVYTLPPSREEMTKNQVSLTCLVKGFYPSDIAVEWESNGQPENNYKTTPPVLDSDGSFFLYSKLTVDKSRWQQGNVFSCSVMHEALHNHYTQKSLSLSPGK

SEQ ID NO: 111 - protein, 216 aa, Artificial Sequence
  Description of Artificial Sequence: Synthetic polypeptide
QSALTQPASVSGSPGQSITISCTGTSSDVGGYNYVSWYQQHPGKAPKLMIYDVSNRPSGVSNRFSGSKSGNTASLTISGLQAEDEADYYCSSYTSSSTRVFGTGTKVTVLGQPKANPTVTLFPPSSEELQANKATLVCLISDFYPGAVTVAWKADGSPVKAGVETTKPSKQSNNKYAASSYLSLTPEQWKSHRSYSCQVTHEGSTVEKTVAPTECS

SEQ ID NO: 112 - protein, 451 aa, Artificial Sequence
  Description of Artificial Sequence: Synthetic polypeptide
EVQLVESGGGLVQPGGSLRLSCAASGFTFSRYWMSWVRQAPGKGLEWVANIKQDGSEKYYVDSVKGRFTISRDNAKNSLYLQMNSLRAEDTAVYYCAREGGWFGELAFDYWGQGTLVTVSSASTKGPSVFPLAPSSKSTSGGTAALGCLVKDYFPEPVTVSWNSGALTSGVHTFPAVLQSSGLYSLSSVVTVPSSSLGTQTYICNVNHKPSNTKVDKRVEPKSCDKTHTCPPCPAPEFEGGPSVFLFPPKPKDTLMISRTPEVTCVVVDVSHEDPEVKFNWYVDGVEVHNAKTKPREEQYNSTYRVVSVLTVLHQDWLNGKEYKCKVSNKALPASIEKTISKAKGQPREPQVYTLPPSREEMTKNQVSLTCLVKGFYPSDIAVEWESNGQPENNYKTTPPVLDSDGSFFLYSKLTVDKSRWQQGNVFSCSVMHEALHNHYTQKSLSLSPGK

SEQ ID NO: 113 - protein, 215 aa, Artificial Sequence
  Description of Artificial Sequence: Synthetic polypeptide
EIVLTQSPGTLSLSPGERATLSCRASQRVSSSYLAWYQQKPGQAPRLLIYDASSRATGIPDRFSGSGSGTDFTLTISRLEPEDFAVYYCQQYGSLPWTFGQGTKVEIKRTVAAPSVFIFPPSDEQLKSGTASVVCLLNNFYPREAKVQWKVDNALQSGNSQESVTEQDSKDSTYSLSSTLTLSKADYEKHKVYACEVTHQGLSSPVTKSFNRGEC

SEQ ID NO: 114 - protein, 450 aa, Artificial Sequence
  Description of Artificial Sequence: Synthetic polypeptide
EVQLVQSGAEVKKPGSSVKVSCKASGYTFTTYWMHWVRQAPGQGLEWIGEIDPSDSYSNYNQKFKDRATLTVDKSTSTAYMELSSLRSEDTAVYYCARNGGLGPAWFSYWGQGTLVTVSSASTKGPSVFPLAPSSKSTSGGTAALGCLVKDYFPEPVTVSWNSGALTSGVHTFPAVLQSSGLYSLSSVVIVPSSSLGTQTYICNVNHKPSNTKVDKKVEPKSCDKTHTCPPCPAPELLGGPCVFLFPPKPKDTLMISRTPEVTCVVVDVSHEDPEVKFNWYVDGVEVHNAKTKPREEQYNSTYRVVSVLTVLHQDWLNGKEYKCKVSNKALPAPIEKTISKAKGQPREPQVYTLPPSREEMTKNQVSLTCLVKGFYPSDIAVEWESNGQPENNYKTTPPVLDSDGSFFLYSKLTVDKSRWQQGNVFSCSVMHEALHNHYTQKSLSLSPGK

SEQ ID NO: 115 - protein, 214 aa, Artificial Sequence
  Description of Artificial Sequence: Synthetic polypeptide
DIQMTQSPSSVSASVGDRVTITCKASQYVGTAVAWYQQKPGKSPKLLIYSASNRYTGVPSRFSDSGSGTDFTLTISSLQPEDFATYFCQQYSSYPWTFGGGTKVEIKRTVAAPSVFIFPPSDEQLKSGTASVVCLLNNFYPREAKVQWKVDNALQSGNSQESVTEQDSKDSTYSLSSTLTLSKADYEKHKVYACEVTHQGLSSPVTKSFNRGEC

SEQ ID NO: 116 - protein, 453 aa, Artificial Sequence
  Description of Artificial Sequence: Synthetic polypeptide
QLQESGPGLVKPSQTLSLTCTVSGGSISSGGYYWSWIRQHPGKGLEWIGYIYYSGSTYYNPSLKSRVTISVDTSKNQFSLKLSSGTAADTAVYYCARDHITMVRGVPKGMDVWGQGTTVTVSSASTKGPSVFPLAPSSKSTSGGTAALGCLVKDYFPEPVTVSWNSGALTSGVHTFPAVLQSSGLYSLSSVVTVPSSSLGTQTYICNVNHKPSNTKVDKKVEPKSCDKTHTCPPCPAPELLGGPSVFLFPPKPKDTLMISRTPEVTCVVVDVSHEDPEVKFNWYVDGVEVHNAKTKPREEQYNSTYRVVSVLTVLHQDWLNGKEYKCKVSNKALPAPIEKTISKAKGQPREPQVYTLPPSREEMTKNQVSLTCLVKGFYPSDIAVEWESNGQPENNYKTTPPVLDSDGSFFLYSKLTVDKSRWQQGNVFSCSVMHEALHNHYTQKSLSLSPGK

SEQ ID NO: 117 - protein, 212 aa, Artificial Sequence
  Description of Artificial Sequence: Synthetic polypeptide
QLTQSPSSLSASVGDRVTITCRASQSISRHLNWYQQKPGKAPKFLIYVASSLQSGVPSRFSGSGSGTDFTLTISSLQPEDFATYFCQQSYSIPRTFGQGTKVEIKRTVAAPSVFIFPPSDEQLKSGTASVVCLLNNFYPREAKVQWKVDNALQSGNSQESVTEQDSKDSTYSLSSTLTLSKADYEKHKVYACEVTHQGLSSPVTKSFNRGEC

SEQ ID NO: 118 - protein, 454 aa, Artificial Sequence
  Description of Artificial Sequence: Synthetic polypeptide
QVQLVESGGGVVQPGRSLRLSCAASGFTFSNYVMHWVRQAPGKGLEWVAIIWYDGSNKYYADSVKGRFTISRDNSKNTLYLQMNSLRAEDTAVYYCAGGYNWNYEYHYYGMDVWGQGTTVTVSSASTKGPSVFPLAPSSKSTSGGTAALGCLVKDYFPEPVTVSWNSGALTSGVHTFPAVLQSSGLYSLSSVVTVPSSSLGTQTYICNVNHKPSNTKVDKKVEPKSCDKTHTCPPCPAPELLGGPSVFLFPPKPKDTLMISRTPEVTCVVVDVSHEDPEVKFNWYVDGVEVHNAKTKPREEQYNSTYRVVSVLTVLHQDWLNGKEYKCKVSNKALPAPIEKTISKAKGQPREPQVYTLPPSREEMTKNQVSLTCLVKGFYPSDIAVEWESNGQPENNYKTTPPVLDSDGSFFLYSKLTVDKSRWQQGNVFSCSVMHEALHNHYTQKSLSLSPGK

SEQ ID NO: 119 - protein, 214 aa, Artificial Sequence
  Description of Artificial Sequence: Synthetic polypeptide
DIQMTQSPSSLSASVGDRVTITCRASQGITNYLAWFQQKPGKAPKSLIYAASSLQSGVPSKFSGSGSGTDFSLTISSLQPEDFATYYCQQYNSYPITFGQGTRLEIKRTVAAPSVFIFPPSDEQLKSGTASVVCLLNNFYPREAKVQWKVDNALQSGNSQESVTEQDSKDSTYSLSSTLTLSKADYEKHKVYACEVTHQGLSSPVTKSFNRGEC

SEQ ID NO: 120 - protein, 453 aa, Artificial Sequence
  Description of Artificial Sequence: Synthetic polypeptide
QVQLVESGGGVVQPGRSLRLSCAASGFAFSRYGMHWVRQAPGKGLEWVAVIWYDGSNKYYADSVKGRFTISRDNSKNTQYLQMNSLRAEDTAVYYCARGGDFLYYYYYGMDVWGQGTTVTVSSASTKGPSVFPLAPSSKSTSGGTAALGCLVKDYFPEPVTVSWNSGALTSGVHTFPAVLQSSGLYSLSSVVTVPSSSLGTQTYICNVNHKPSNTKVDKKVEPKSCDKTHTCPPCPAPELLGGPSVFLFPPKPKDTLMISRTPEVTCVVVDVSHEDPEVKFNWYVDGVEVHNAKTKPREEQYNSTYRVVSVLTVLHQDWLNGKEYKCKVSNKALPAPIEKTISKAKGQPREPQVYTLPPSREEMTKNQVSLTCLVKGFYPSDIAVEWESNGQPENNYKTTPPVLDSDGSFFLYSKLTVDKSRWQQGNVFSCSVMHEALHNHYTQKSLSLSPGK

SEQ ID NO: 121 - protein, 214 aa, Artificial Sequence
  Description of Artificial Sequence: Synthetic polypeptide
DIQMTQSPSSLSASVGDRVTITCRASQGISNYLAWYQQKTGKVPKFLIYEASTLQSGVPSRFSGGGSGTDFTLTISSLQPEDVATYYCQNYNSAPFTFGPGTKVDIKRTVAAPSVFIFPPSDEQLKSGTASVVCLLNNFYPREAKVQWKVDNALQSGNSQESVTEQDSKDSTYSLSSTLTLSKADYEKHKVYACEVTHQGLSSPVTKSFNRGEC

SEQ ID NO: 122 - protein, 449 aa, Artificial Sequence
  Description of Artificial Sequence: Synthetic polypeptide
QVQLVQSGPEVKKPGASVKVSCKASGYTFTDYAVHWVRQAPGKRLEWIGVISTYNDYTYNNQDFKGRVTMTRDTSASTAYMELSRLRSEDTAVYYCARGNSYFYALDYWGQGTSVTVSSASTKGPSVFPLAPSSKSTSGGTAALGCLVKDYFPEPVTVSWNSGALTSGVHTFPAVLQSSGLYSLSSVVTVPSSSLGTQTYICNVNHKPSNTKVDKKVEPKSCDKTHTCPPCPAPELLGGPSVFLFPPKPKDTLMISRTPEVTCVVVDVSHEDPEVKFNWYVDGVEVHNAKTKPREEQYNSTYRVVSVLTVLHQDWLNGKEYKCKVSNKALPAPIEKTISKAKGQPREPQVYTLPPSREEMTKNQVSLTCLVKGFYPSDIAVEWESNGQPENNYKTTPPVLDSDGSFFLYSKLTVDKSRWQQGNVFSCSVMHEALHNHYTQKSLSLSPGK

SEQ ID NO: 123 - protein, 218 aa, Artificial Sequence
  Description of Artificial Sequence: Synthetic polypeptide
EIVLTQSPATLSLSPGERATLSCRASESVDSYGKSFMHWYQQKPGQAPRLLIYRASNLESGIPARFSGSGSGTDFTLTISSLEPEDFAVYYCQQSNEDPWTFGGGTKLEIKRTVAAPSVFIFPPSDEQLKSGTASVVCLLNNFYPREAKVQWKVDNALQSGNSQESVTEQDSKDSTYSLSSTLTLSKADYEKHKVYACEVTHQGLSSPVTKSFNRGEC

SEQ ID NO: 124 - protein, 445 aa, Artificial Sequence
  Description of Artificial Sequence: Synthetic polypeptide
EVQLVQSGAEVKKPGESLKISCKGSGYSFTSSWINWVRQMPGKGLEWMGRIYPGEGDTNYSGNFEGQVTISADKSISTAYLQWSSLKASDTAMYYCTRGLVMDYWGQGTLVTVSSASTKGPSVFPLAPSSKSTSGGTAALGCLVKDYFPEPVTVSWNSGALTSGVHTFPAVLQSSGLYSLSSVVTVPSSSLGTQTYICNVNHKPSNTKVDKKVEPKSCDKTHTCPPCPAPELLGGPSVFLFPPKPKDTLMISRTPEVTCVVVDVSHEDPEVKFNWYVDGVEVHNAKTKPREEQYNSTYRVVSVLTVLHQDWLNGKEYKCKVSNKALPAPIEKTISKAKGQPREPQVYTLPPSREEMTKNQVSLTCLVKGFYPSDIAVEWESNGQPENNYKTTPPVLDSDGSFFLYSKLTVDKSRWQQGNVFSCSVMHEALHNHYTQKSLSLSPGK

SEQ ID NO: 125 - protein, 218 aa, Artificial Sequence
  Description of Artificial Sequence: Synthetic polypeptide
EIVLTQSPATLSLSPGERATLSCRASQSVDYNGISYMHWYQQKPGQAPRLLIYAASNVQSGIPARFSGSGSGTDFTLTISSLEPEDFAVYYCQQSIEDPPTFGGGTKVEIKRTVAAPSVFIFPPSDEQLKSGTASVVCLLNNFYPREAKVQWKVDNALQSGNSQESVTEQDSKDSTYSLSSTLTLSKADYEKHKVYACEVTHQGLSSPVTKSFNRGEC

SEQ ID NO: 126 - protein, 449 aa, Artificial Sequence
  Description of Artificial Sequence: Synthetic polypeptide
EVQLVESGGGLVQPGGSLRLSCAASGFDFSRYWMSWVRQAPGKGLEWIGEINPDSSTINYAPSLKDKFIISRDNAKNSLYLQMNSLRAEDTAVYYCARPDGNYWYFDVWGQGTLVTVSSASTKGPSVFPLAPSSKSTSGGTAALGCLVKDYFPEPVTVSWNSGALTSGVHTFPAVLQSSGLYSLSSVVTVPSSSLGTQTYICNVNHKPSNTKVDKKVEPKSCDKTHTCPPCPAPELLGGPSVFLFPPKPKDTLMISRTPEVTCVVVDVSHEDPEVKFNWYVDGVEVHNAKTKPREEQYNSTYRVVSVLTVLHQDWLNGKEYKCKVSNKALPAPIEKTISKAKGQPREPQVYTLPPSRDELTKNQVSLTCLVKGFYPSDIAVEWESNGQPENNYKTTPPVLDSDGSFFLYSKLTVDKSRWQQGNVFSCSVMHEALHNHYTQKSLSLSPGK

SEQ ID NO: 127 - protein, 214 aa, Artificial Sequence
  Description of Artificial Sequence: Synthetic polypeptide
DIQMTQSPSSLSASVGDRVTITCKASQDVGIAVAWYQQKPGKVPKLLIYWASTRHTGVPDRFSGSGSGTDFTLTISSLQPEDVATYYCQQYSSYPYTFGQGTKVEIKRTVAAPSVFIFPPSDEQLKSGTASVVCLLNNFYPREAKVQWKVDNALQSGNSQESVTEQDSKDSTYSLSSTLTLSKADYEKHKVYACEVTHQGLSSPVTKSFNRGEC

SEQ ID NO: 128 - protein, 448 aa, Artificial Sequence
  Description of Artificial Sequence: Synthetic polypeptide
EVQLLESGGGLVQPGGSLRLSCAASGFTFSNYAMSWVRQAPGKGLEWVSSISGSGDYTYYTDSVKGRFTISRDNSKNTLYLQMNSLRAEDTAVYYCARSPWGYYLDSWGQGTLVTVSSASTKGPSVFPLAPSSKSTSGGTAALGCLVKDYFPEPVTVSWNSGALTSGVHTFPAVLQSSGLYSLSSVVTVPSSSLGTQTYICNVNHKPSNTKVDKRVEPKSCDKTHTCPPCPAPELLGGPSVFLFPPKPKDTLMISRTPEVTCVVVDVSHEDPEVKFNWYVDGVEVHNAKTKPREEQYNSTYRVVSVLTVLHQDWLNGKEYKCKVSNKALPAPIEKTISKAKGQPREPQVYTLPPSREEMTKNQVSLTCLVKGFYPSDIAVEWESNGQPENNYKTTPPVLDSDGSFFLYSKLTVDKSRWQQGNVFSCSVMHEALHNHYTQKSLSLSPGK

SEQ ID NO: 129 - protein, 214 aa, Artificial Sequence
  Description of Artificial Sequence: Synthetic polypeptide
DIQMTQSPPSLSASAGDRVTITCRASQGISSRLAWYQQKPEKAPKSLIYAASSLQSGVPSRFSGSGSGTDFTLTISSLQPEDFATYYCQQYNSYPYTFGQGTKLEIKRTVAAPSVFIFPPSDEQLKSGTASVVCLLNNFYPREAKVQWKVDNALQSGNSQESVTEQDSKDSTYSLSSTLTLSKADYEKHKVYACEVTHQGLSSPVTKSFNRGEC

SEQ ID NO: 130 - protein, 451 aa, Artificial Sequence
  Description of Artificial Sequence: Synthetic polypeptide
QVQLVQSGAEVKKPGSSVKVSCKASGGTFSSYAISWVRQAPGQGLEWMGGIIPIFGTANYAQKFQGRVTITADESTSTAYMELSSLRSEDTAVYYCARGLWEVRALPSVYWGQGTLVTVSSASTKGPSVFPLAPSSKSTSGGTAALGCLVKDYFPEPVTVSWNSGALTSGVHTFPAVLQSSGLYSLSSVVTVPSSSLGTQTYICNVNHKPSNTKVDKKVEPKSCDKTHTCPPCPAPELLGGPSVFLFPPKPKDTLMISRTPEVTCVVVDVSHEDPEVKFNWYVDGVEVHNAKTKPREEQYNSTYRVVSVLTVLHQDWLNGKEYKCKVSNKALPAPIEKTISKAKGQPREPQVYTLPPSREEMTKNQVSLTCLVKGFYPSDIAVEWESNGQPENNYKTTPPVLDSDGSFFLYSKLTVDKSRWQQGNVFSCSVMHEALHNHYTQKSLSLSPGK

SEQ ID NO: 131 - protein, 214 aa, Artificial Sequence
  Description of Artificial Sequence: Synthetic polypeptide
SYELTQPPSVSVAPGQTARITCGANDIGSKSVHWYQQKAGQAPVLVVSEDIIRPSGIPERISGSNSGNTATLTISRVEAGDEADYYCQVWDRDSDQYVFGTGTKVTVLGQPKAAPSVTLFPPSSEELQANKATLVCLISDFYPGAVTVAWKADSSPVKAGVETTTPSKQSNNKYAASSYLSLTPEQWKSHRSYSCQVTHEGSTVEKTVAPTECS

SEQ ID NO: 132 - protein, 447 aa, Artificial Sequence
  Description of Artificial Sequence: Synthetic polypeptide
QVQLVQSGAEVKKPGSSVKVSCKASGYTFSSNVISWVRQAPGQGLEWMGGVIPIVDIANYAQRFKGRVTITADESTSTTYMELSSLRSEDTAVYYCASTLGLVLDAMDYWGQGTLVTVSSASTKGPSVFPLAPCSRSTSESTAALGCLVKDYFPEPVTVSWNSGALTSGVHTFPAVLQSSGLYSLSSVVTVPSSSLGTKTYTCNVDHKPSNTKVDKRVESKYGPPCPSCPAPEFLGGPSVFLFPPKPKDTLMISRTPEVTCVVVDVSQEDPEVQFNWYVDGVEVHNAKTKPREEQFNSTYRVVSVLTVLHQDWLNGKEYKCKVSNKGLPSSIEKTISKAKGQPREPQVYTLPPSQEEMTKNQVSLTCLVKGFYPSDIAVEWESNGQPENNYKTTPPVLDSDGSFFLYSRLTVDKSRWQEGNVFSCSVMHEALHNHYTQKSLSLSLGK

SEQ ID NO: 133 - protein, 215 aa, Artificial Sequence
  Description of Artificial Sequence: Synthetic polypeptide
ETVLTQSPGTLSLSPGERATLSCRASQSLGSSYLAWYQQKPGQAPRLLIYGASSRAPGIPDRFSGSGSGTDFTLTISRLEPEDFAVYYCQQYADSPITFGQGTRLEIKRTVAAPSVFIFPPSDEQLKSGTASVVCLLNNFYPREAKVQWKVDNALQSGNSQESVTEQDSKDSTYSLSSTLTLSKADYEKHKVYACEVTHQGLSSPVTKSFNRGEC

SEQ ID NO: 134 - protein, 451 aa, Artificial Sequence
  Description of Artificial Sequence: Synthetic polypeptide
QLQVQESGPGLVKPSETLSLTCTVSGGSISNSYFSWGWIRQPPGKGLEWIGSFYYGEKTYYNPSLKSRATISIDTSKSQFSLKLSSVTAADTAVYYCPRGPTMIRGVIDSWGQGTLVTVSSASTKGPSVFPLAPSSKSTSGGTAALGCLVKDYFPEPVTVSWNSGALTSGVHTFPAVLQSSGLYSLSSVVTVPSSSLGTQTYICNVNHKPSNTKVDKRVEPKSCDKTHTCPPCPAPEAEGAPSVFLFPPKPKDTLMISRTPEVTCVVVDVSHEDPEVKFNWYVDGVEVHNAKTKPREEQYNSTYRVVSVLTVLHQDWLNGKEYKCKVSNKALPSSIEKTISKAKGQPREPQVYTLPPSREEMTKNQVSLTCLVKGFYPSDIAVEWESNGQPENNYKTTPPVLDSDGSFFLYSKLTVDKSRWQQGNVFSCSVMHEALHNHYTQKSLSLSPGK

SEQ ID NO: 135 - protein, 214 aa, Artificial Sequence
  Description of Artificial Sequence: Synthetic polypeptide
EIVLTQSPATLSLSPGERATLSCRASQSVRSYLAWYQQKPGQAPRLLIYDASNRATGIPARFSGSGSGTDFTLTISSLEPEDFAVYYCQQRSNWPPTFGQGTKVEIKRTVAAPSVFIFPPSDEQLKSGTASVVCLLNNFYPREAKVQWKVDNALQSGNSQESVTEQDSKDSTYSLSSTLTLSKADYEKFDVYACEVTHQGLSSPVTKSFNRGEC

SEQ ID NO: 136 - protein, 448 aa, Artificial Sequence
  Description of Artificial Sequence: Synthetic polypeptide
QVQLQESGPGLVKPSETLSLTCAVSGYSITSDYAWNWIRQPPGKGLEWIGYISYSGSTSYNPSLRSRVTISRDTSKNQFFLKLSSVTAADTAVYYCARRQVGLGFAYWGQGTLVTVSSASTKGPSVFPLAPSSKSTSGGTAALGCLVKDYFPEPVTVSWNSGALTSGVHTFPAVLQSSGLYSLSSVVTVPSSSLGTQTYICNVNHKPSNTKVDKRVEPKSCDKTHTCPPCPAPELLGGPSVFLFPPKPKDTLMISRTPEVTCVVVDVSHEDPEVKFNWYVDGVEVHNAKTKPREEQYNSTYRVVSVLTVLHQDWLNGKEYKCKVSNKALPAPIEKTISKAKGQPREPQVYTLPPSREEMTKNQVSLTCLVKGFYPSDIAVEWESNGQPENNYKTTPPVLDSDGSFFLYSKLTVDKSRWQQGNVFSCSVMHEALHNHYTQKSLSLSPGK

SEQ ID NO: 137 - protein, 214 aa, Artificial Sequence
  Description of Artificial Sequence: Synthetic polypeptide
DIQMTQSPSSLSASVGDRVTITCKASQDVSTAVAWYQQKPGKAPKLLIYSASYRYTGVPSRFSGSGSGTDFTFTISSLQPEDIATYYCQQHYSTPWTFGQGTKVEIKRTVAAPSVFIFPPSDEQLKSGTASVVCLLNNFYPREAKVQWKVDNALQSGNSQESVTEQDSKDSTYSLSNTLTLSKADYEKHKVYACEVTHQGLSSPVTKSFNRGEC

SEQ ID NO: 138 - protein, 456 aa, Artificial Sequence
  Description of Artificial Sequence: Synthetic polypeptide
EVQLQQSGPGLVKPSQTLSLTCAISGDSVSSNSAAWNWIRQSPSRGLEWLGKTYYRFKWYSDYAVSVKGRITINPDTSKNQFSLQLNSVTPEDTAVFYCTRESTTYDLLAGPFDYWGQGTLVTVSSASTKGPSVFPLAPSSKSTSGGTAALGCLVKDYFPEPVTVSWNSGALTSGVHTFPAVLQSSGLYSLSSVVTVPSSSLGTQTYICNVNHKPSNTKVDKKVEPKSCDKTHTCPPCPAPELLGGPSVFLFPPKPKDTLMISRTPEVTCVVVDVSHEDPEVKFNWYVDGVEVHNAKTKPREEQYNSTYRVVSVLTVLHQDWLNGKEYKCKVSNKALPAPIEKTISKAKGQPREPQVYTLPPSREEMTKNQVSLTCLVKGFYPSDIAVEWESNGQPENNYKTTPPVLDSDGSFFLYSKLTVDKSRWQQGNVFSCSVMHEALHNHYTQKSLSLSPGK

SEQ ID NO: 139 - protein, 220 aa, Artificial Sequence
  Description of Artificial Sequence: Synthetic polypeptide
DIVMTQSPDSLAVSLGERATINCKSSQTVLYSSNNKKYLAWYQQKPGQPPNLLIYWASTRESGVPDRFSGSGSGTDFTLTISSLQAEDVAVYYCQQYYSTPFTFGPGTKVEIKRTVAAPSVFIFPPSDEQLKSGTASVVCLLNNFYPREAKVQWKVDNALQSGNSQESVTEQDSKDSTYSLSSTLTLSKADYEKHKVYACEVTHQGLSSPVTKSFNRGEC

SEQ ID NO: 140 - protein, 214 aa, Artificial Sequence
  Description of Artificial Sequence: Synthetic polypeptide
QSALTQPRSVSGSPGQSVTISCTGTSSDVGGYNYVSWYQQHPGKAPKLMIYDVSKRPSGVPDRFSGSKSGNTASLTISGLQAEDEADYYCSSYADSVVFGGGTKVTVLGQPKAAPSVTLFPPSSEELQANKATLVCLISDFYPGAVTVAWKADSSPVKAGVETTTPSKQSNNKYAASSYLSLTPEQWKSHKSYSCQVTHEGSTVEKTVAPTECS

SEQ ID NO: 141 - protein, 447 aa, Artificial Sequence
  Description of Artificial Sequence: Synthetic polypeptide
EVQLVESGGGLVQPGGSLRLSCAASGFTFSSYAMSWVRQAPGKGLEWVSAISVSGGSTYYADSVKGRFTISRDNSKNTLYLQMNSLRAEDTAVYYCAKANWGFFDYWGQGTLVTVSSASTKGPSVFPLAPSSKSTSGGTAALGCLVKDYFPEPVTVSWNSGALTSGVHTFPAVLQSSGLYSLSSVVTVPSSSLGTQTYICNVNHKPSNTKVDKKVEPKSCDKTHTCPPCPAPELLGGPSVFLFPPKPKDTLMISRTPEVTCVVVDVSHEDPEVKFNWYVDGVEVHNAKTKPREEQYNSTYRVVSVLTVLHQDWLNGKEYKCKVSNKALPAPIEKTISKAKGQPREPQVYTLPPSREEMTKNQVSLTCLVKGFYPSDIAVEWESNGQPENNYKTTPPVLDSDGSFFLYSKLTVDKSRWQQGNVFSCSVMHEALHNHYTQKSLSLSPGK

SEQ ID NO: 142 - protein, 453 aa, Artificial Sequence
  Description of Artificial Sequence: Synthetic polypeptide
EVQLVESGGGLVQPGGSLRLSCAASGYDFTHYGMNWVRQAPGKGLEWVGWINTYTGEPTYAADFKRRFTFSLDTSKSTAYLQMNSLRAEDTAVYYCAKYPYYYGTSHWYFDVWGQGTLVTVSSASTKGPSVFPLAPSSKSTSGGTAALGCLVKDYFPEPVTVSWNSGALTSGVHTFPAVLQSSGLYSLSSVVTVPSSSLGTQTYICNVNHKPSNTKVDKKVEPKSCDKTHLCPPCPAPELLGGPSVFLFPPKPKDTLMISRTPEVTCVVVDVSHEDPEVKFNWYVDGVEVHNAKTKPREEQYNSTYRVVSVLTVLHQDWLNGKEYKCKVSNKALPAPIEKTISKAKGQPREPQVYTLPPSREEMTKNQVSLTCLVKGFYPSDIAVEWESNGQPENNYKTTPPVLDSDGSFFLYSKLTVDKSRWQQGNVFSCSVMHEALHNHYTQKSLSLSPGK

SEQ ID NO: 143 - protein, 214 aa, Artificial Sequence
  Description of Artificial Sequence: Synthetic polypeptide
DIQLTQSPSSLSASVGDRVTITCSASQDISNYLNWYQQKPGKAPKVLIYFTSSLHSGVPSRFSGSGSGTDFTLTISSLQPEDFATYYCQQYSTVPWTFGQGTKVEIKRTVAAPSVFIFPPSDEQLKSGTASVVCLLNNFYPREAKVQWKVDNALQSGNSQESVTEQDSKDSTYSLSSTLTLSKADYEKHKVYACEVTHQGLSSPVTKSFNRGEC

SEQ ID NO: 144 - protein, 453 aa, Artificial Sequence
  Description of Artificial Sequence: Synthetic polypeptide
EVQLVESGGGLVQPGGSLRLSCAASGYTFTNYGMNWVRQAPGKGLEWVGWINTYTGEPTYAADFKRRFTFSLDTSKSTAYLQMNSLRAEDTAVYYCAKYPHYYGSSHWYFDVWGQGTLVTVSSASTKGPSVFPLAPSSKSTSGGTAALGCLVKDYFPEPVTVSWNSGALTSGVHTFPAVLQSSGLYSLSSVVTVPSSSLGTQTYICNVNHKPSNTKVDKKVEPKSCDKTHTCPPCPAPELLGGPSVFLFPPKPKDTLMISRTPEVTCVVVDVSHEDPEVKFNWYVDGVEVHNAKTKPREEQYNSTYRVVSVLTVLHQDWLNGKEYKCKVSNKALPAPIEKTISKAKGQPREPQVYTLPPSREEMTKNQVSLTCLVKGFYPSDIAVEWESNGQPENNYKTTPPVLDSDGSFFLYSKLTVDKSRWQQGNVFSCSVMHEALHNHYTQKSLSLSPGK

SEQ ID NO: 145 - protein, 448 aa, Artificial Sequence
  Description of Artificial Sequence: Synthetic polypeptide
EVQLVESGGGLVQPGGSLRLSCAASGFTFSNFPMAWVRQAPGKGLEWVATISSSDGTTYYRDSVKGRFTISRDNAKNSLYLQMNSLRAEDTAVYYCARGYYNSPFAYWGQGTLVTVSSASTKGPSVFPLAPSSKSTSGGTAALGCLVKDYFPEPVTVSWNSGALTSGVHTFPAVLQSSGLYSLSSVVTVPSSSLGTQTYICNVNHKPSNTKVDKKVEPKSCDKTHTCPPCPAPEAAGGPSVFLFPPKPKDTLMISRTPEVTCVVVDVSHEDPEVKFNWYVDGVEVHNAKTKPREEQYNSTYRVVSVLTVLHQDWLNGKEYKCKVSNKALPAPIEKTISKAKGQPREPQVYTLPPSREEMTKNQVSLTCLVKGFYPSDIAVEWESNGQPENNYKTTPPVLDSDGSFFLYSKLTVDKSRWQQGNVFSCSVMHEALHNHYTQKSLSLSPGK

SEQ ID NO: 146 - protein, 214 aa, Artificial Sequence
  Description of Artificial Sequence: Synthetic polypeptide
DIQMTQSPSSLSASVGDRVTITCRASEDIYSNLAWYQQKPGKAPKLLIYDTNNLADGVPSRFSGSGSGTDFTLTISSLQPEDFATYYCQQYNNYPPTFGQGTKLEIKRTVAAPSVFIFPPSDEQLKSGTASVVCLLNNFYPREAKVQWKVDNALQSGNSQESVTEQDSKDSTYSLSSTLTLSKADYEKHKVYACEVTHQGLSSPVTKSFNRGEC

SEQ ID NO: 147 - protein, 446 aa, Artificial Sequence
  Description of Artificial Sequence: Synthetic polypeptide
EVQLVQSGGGLVKPGGSLRLSCAASGFTFSSYSMNWVRQAPGKGLEWVSSISSSSSYIYYADSVKGRFTISRDNAKNSLYLQMNSLRAEDTAVYYCARVTDAFDIWGQGTMVTVSSASTKGPSVFPLAPSSKSTSGGTAALGCLVKDYFPEPVTVSWNSGALTSGVHTFPAVLQSSGLYSLSSVVTVPSSSLGTQTYICNVNHKPSNTKVDKKVEPKSCDKTHTCPPCPAPELLGGPSVFLFPPKPKDTLMISRTPEVTCVVVDVSHEDPEVKFNWYVDGVEVHNAKTKPREEQYNSTYRVVSVLTVLHQDWLNGKEYKCKVSNKALPAPIEKTISKAKGQPREPQVYTLPPSREEMTKNQVSLTCLVKGFYPSDIAVEWESNGQPENNYKTTPPVLDSDGSFFLYSKLTVDKSRWQQGNVFSCSVMHEALHNHYTQKSLSLSPGK

SEQ ID NO: 148 - protein, 214 aa, Artificial Sequence
  Description of Artificial Sequence: Synthetic polypeptide
DIQMTQSPSSVSASIGDRVTITCRASQGIDNWLGWYQQKPGKAPKLLIYDASNLDTGVPSRFSGSGSGTYFTLTISSLQAEDFAVYFCQQAKAFPPTFGGGTKVDIKGTVAAPSVFIFPPSDEQLKSGTASVVCLLNNFYPREAKVQWKVDNALQSGNSQESVTEQDSKDSTYSLSSTLTLSKADYEKHKVYACEVTHQGLSSPVTKSFNRGEC

SEQ ID NO: 149 - protein, 450 aa, Artificial Sequence
  Description of Artificial Sequence: Synthetic polypeptide
QVQLVQSGAEVKKPGSSVKVSCKASGGTFSSYAISWVRQAPGQGLEWMGGIIPIFGTANYAQKFQGRVTITADESTSTAYMELSSLRSEDTAVYYCARSSYGWSYEFDYWGQGTLVTVSSASTKGPSVFPLAPSSKSTSGGTAALGCLVKDYFPEPVTVSWNSGALTSGVHTFPAVLQSSGLYSLSSVVTVPSSSLGTQTYICNVNHKPSNTKVDKKVEPKSCDKTHTCPPCPAPELLGGPSVFLFPPKPKDTLMISRTPEVTCVVVDVSHEDPEVKFNWYVDGVEVHNAKTKPREEQYNSTYRVVSVLTVLHQDWLNGKEYKCKVSNKALPAPIEKTISKAKGQPREPQVYTLPPSREEMTKNQVSLTCLVKGFYPSDIAVEWESNGQPENNYKTTPPVLDSDGSFFLYSKLTVDKSRWQQGNVFSCSVMHEALHNHYTQKSLSLSPGK

SEQ ID NO: 150 - protein, 214 aa, Artificial Sequence
  Description of Artificial Sequence: Synthetic polypeptide
DIQMTQSPSSLSASVGDRVTITCRASQSIDTRLNWYQQKPGKAPKLLIYSASSLQSGVPSRFSGSGSGTDFTLTISSLQPEDFATYYCQQSAYNPITFGQGTKVEIKRTVAAPSVFIFPPSDEQLKSGTASVVCLLNNFYPREAKVQWKVDNALQSGNSQESVTEQDSKDSTYSLSSTLTLSKADYEKHKVYACEVTHQGLSSPVTKSFNRGEC

SEQ ID NO: 151 - protein, 445 aa, Artificial Sequence
  Description of Artificial Sequence: Synthetic polypeptide
QVQLVQSGAEVKKPGASVKVSCKASGYIFTAYTMHWVRQAPGQGLEWMGWIKPNNGLANYAQKFQGRVTMTRDTSISTAYMELSRLRSDDTAVYYCARSEITTEFDYWGQGTLVTVSSASTKGPSVFPLAPSSKSTSGGTAALGCLVKDYFPEPVTVSWNSGALTSGVHTFPAVLQSSGLYSLSSVVTVPSSSLGTQTYICNVNHKPSNTKVDKRVEPKSCDCHCPPCPAPELLGGPSVFLFPPKPKDTLMISRTPEVTCVVVDVSHEDPEVKFNWYVDGVEVHNAKTKPREEQYNSTYRVVSVLTVLHQDWLNGKEYKCKVSNKALPAPIEKTISKAKGQPREPQVYTLPPSREEMTKNQVSLTCLVKGFYPSDIAVEWESNGQPENNYKTTPPVLDSDGSFFLYSKLTVDKSRWQQGNVFSCSVMHEALHNHYTQKSLSLSPG

SEQ ID NO: 152 - protein, 218 aa, Artificial Sequence
  Description of Artificial Sequence: Synthetic polypeptide
DIVMTQSPDSLAVSLGERATINCKSSESVDSYANSFLHWYQQKPGQPPKLLIYRASTRESGVPDRFSGSGSGTDFTLTISSLQAEDVAVYYCQQSKEDPLTFGGGTKVEIKRTVAAPSVFIFPPSDEQLKSGTASVVCLLNNFYPREAKVQWKVDNALQSGNSQESVTEQDSKDSTYSLSSTLTLSKADYEKHKVYACEVTHQGLSSPVTKSFNRGEC

SEQ ID NO: 153 - protein, 449 aa, Artificial Sequence
  Description of Artificial Sequence: Synthetic polypeptide
QVQLVQSGAEVKKPGASVKVSCKASGYTFTEYTLHWVRQAPGQRLEWMGGINPNNGDTIYNQKFKGRVTITRDTSASTAYMELSSLRSEDTAVYYCARRAITVYAMDYWGQGTLVTVSSASTKGPSVFPLAPSSKSTSGGTAALGCLVKDYFPEPVTVSWNSGALTSGVHTFPAVLQSSGLYSLSSVVTVPSSSLGTQTYICNVNHKPSNTKVDKKVEPKSCDKTHTCPPCPAPELLGGPSVFLFPPKPKDTLMISRTPEVTCVVVDVSHEDPEVKFNWYVDGVEVHNAKTKPREEQYNSTYRVVSVLTVLHQDWLNGKEYKCKVSNKALPAPIEKTISKAKGQPREPQVYTLPPSREEMTKNQVSLTCLVKGFYPSDIAVEWESNGQPENNYKTTPPVLDSDGSFFLYSKLTVDKSRWQQGNVFSCSVMHEALHNHYTQKSLSLSPGK

SEQ ID NO: 154 - protein, 214 aa, Artificial Sequence
  Description of Artificial Sequence: Synthetic polypeptide
DIQMTQSPSSVSASVGDRVTITCKASEDIYNRLAWYQQKPGKAPKLLIYGATSLETGVPSRFSGSGSGTDYTLTISSLQPEDFATYYCQQYWSTPLTFGQGTKLEIKRTVAAPSVFIFPPSDEQLKSGTASVVCLLNNFYPREAKVQWKVDNALQSGNSQESVTEQDSKDSTYSLSSTLTLSKADYEKHKVYACEVTHQGLSSPVTKSFNRGEC

SEQ ID NO: 155 - protein, 456 aa, Artificial Sequence
  Description of Artificial Sequence: Synthetic polypeptide
QVQLVQSGAEVKKPGASVKVSCQASGYRFSNFVIHWVRQAPGQRFEWMGWINPYNGNKEFSAKFQDRVTFTADTSANTAYMELRSLRSADTAVYYCARVGPYSWDDSPQDNYYMDVWGKGTTVIVSSASTKGPSVFPLAPSSKSTSGGTAALGCLVKDYFPEPVTVSWNSGALTSGVHTFPAVLQSSGLYSLSSVVTVPSSSLGTQTYICNVNHKPSNTKVDKRVEPKSCDKTHTCPPCPAPELLGGPSVFLFPPKPKDTLMISRTPEVTCVVVDVSHEDPEVKFNWYVDGVEVHNAKTKPREEQYNSTYRVVSVLTVLHQDWLNGKEYKCKVSNKALPAPIEKTISKAKGQPREPQVYTLPPSREEMTKNQVSLTCLVKGFYSDIAVEWESNGQPENNYKTTPPVLDSDGSFFLYSKLTVDKSRWQQGNVFSCSVMHEALHNHYTQKSLSLSPGK

SEQ ID NO: 156 - protein, 215 aa, Artificial Sequence
  Description of Artificial Sequence: Synthetic polypeptide
EIVLTQSPGTLSLSPGERATFSCRSSHSIRSRRVAWYQHKPGQAPRLVIHGVSNRASGISDRFSGSGSGTDFTLTITRVEPEDFALYYCQVYGASSYTFGQGTKLERKRTVAAPSVFIFPPSDEQLKSGTASVVCLLNNFYPREAKVQWKVDNALQSGNSQESVTEQDSKDSTYSLSSTLTLSKADYEKHKVYACEVTHQGLSSPVTKSFNRGEC

SEQ ID NO: 157 - protein, 452 aa, Artificial Sequence
  Description of Artificial Sequence: Synthetic polypeptide
EVQLVQSGAEVKKPGASVKVSCKASGDTFKRYYVHWVRQAPGQGLEWMGIINPSGVSTTYAQKFQGRVTMTRDTSTSTVYMELSSLRSEDTAVYYCAEVRGSGFNYFGMDVWGQGTLVTVSSASTKGPSVFPLAPSSKSTSGGTAALGCLVKDYFPEPVTVSWNSGALTSGVHTFPAVLQSSGLYSLSSVVTVPSSSLGTQTYICNVNHKPSNTKVDKKVEPKSCDKTHTCPPCPAPELLGGPSVFLFPPKPKDTLMISRTPEVTCVVVDVSHEDPEVKFNWYVDGVEVHNAKTKPREEQYNSTYRVVSVLTVLHQDWLNGKEYKCKVSNKALPAPIEKTISKAKGQPREPQVYTLPPSREEMTKNQVSLTCLVKGFYPSDIAVEWESNGQPENNYKTTPPVLDSDGSFFLYSKLTVDKSRWQQGNVFSCSVMHEALHNHYTQKSLSLSPGK

SEQ ID NO: 158 - protein, 212 aa, Artificial Sequence
  Description of Artificial Sequence: Synthetic polypeptide
SYELTQPPSVSVSPGQTASITCSGDKLGDKYASWYQQKPGQSPVLVIYQDNRRPSGIPERFSGSNSGNTATLTISGTQAMDEADYYCQAWDSDTYVFGTGTKVTVLGQPKAAPSVTLFPPSSEELQANKATLVCLISDFYPGAVTVAWKADSSPVKAGVETTTPSKQSNNKYAASSYLSLTPEQWKSHRSYSCQVTHEGSTVEKTVAPTECS

SEQ ID NO: 159 - protein, 447 aa, Artificial Sequence
  Description of Artificial Sequence: Synthetic polypeptide
EVQLVESGGGLVQPGGSLRLSCAASGFTFSSYNMNWVRQAPGKGLEWVSYISSSSSTIYYADSVKGRFTISRDNAKNSLSLQMNSLRDEDTAVYYCARAYYYGMDVWGQGTTVTVSSASTKGPSVFPLAPSSKSTSGGTAALGCLVKDYFPEPVTVSWNSGALTSGVHTFPAVLQSSGLYSLSSVVTVPSSSLGTQTYICNVNHKPSNTKVDKRVEPKSCDKTHTCPPCPAPELLGGPSVFLFPPKPKDTLMISRTPEVTCVVVDVSHEDPEVKFNWYVDGVEVHNAKTKPREEQYNSTYRVVSVLTVLHQDWLNGKEYKCKVSNKALPAPIEKTISKAKGQPREPQVYTLPPSREEMTKNQVSLTCLVKGFYPSDIAVEWESNGQPENNYKTTPPVLDSDGSFFLYSKLTVDKSRWQQGNVFSCSVMHEALHNHYTQKSLSLSPGK

SEQ ID NO: 160 - protein, 214 aa, Artificial Sequence
  Description of Artificial Sequence: Synthetic polypeptide
DIQMTQSPSSVSASVGDRVTITCRASQGISGWLAWYQQKPGKAPKFLIYAASTLQSGVPSRFSGSGSGTDFTLTISSLQPEDFATYYCQQANSFPPTFGGGTKVEIKRTVAAPSVFIFPPSDEQLKSGTASVVCLLNNFYPREAKVQWKVDNALQSGNSQESVTEQDSKDSTYSLSSTLTLSKADYEKHKVYACEVTHQGLSSPVTKSFNRGEC

SEQ ID NO: 161 - protein, 447 aa, Artificial Sequence
  Description of Artificial Sequence: Synthetic polypeptide
QVQLQQWGAGLLKPSETLSLTCAVYGGSFSGYYWSWIRQPPGKGLEWIGEINHSGSTNYNPSLKSRVTISVDTSKNQFSLKLSSVTAADTAVYYCARGRRFGDFDYWGQGTLVTVSSASTKGPSVFPLAPSSKSTSGGTAALGCLVKDYFPEPVTVSWNSGALTSGVHTFPAVLQSSGLYSLSSVVTVPSSSLGTQTYICNVNHKPSNTKVDKKVEPKSCDKTHTCPPCPAPELLGGPSVFLFPPKPKDTLMISRTPEVTCVVVDVSHEDPEVKFNWYVDGVEVHNAKTKPREEQYNSTYRVVSVLTVLHQDWLNGKEYKCKVSNKALPAPIEKTISKAKGQPREPQVYTLPPSREEMTKNQVSLTCLVKGFYPSDIAVEWESNGQPENNYKTTPPVLDSDGSFFLYSKLTVDKSRWQQGNVFSCSVMHEALHNHYTQKSLSLSPGK

SEQ ID NO: 162 - protein, 214 aa, Artificial Sequence
  Description of Artificial Sequence: Synthetic polypeptide
QPVLTQPPSVSVAPGKTARITCGGNNIGSKSVHWYQQKPGQAPVLVVYDDSDRPPGIPERFSGSNSGNTATLTISRVEAGDEADYYCQVWDSSSDHSPFGTGTKVTVLGQPKANPTVTLFPPSSEELQANKATLVCLISDFYPGAVTVAWKADGSPVKAGVETTKPSKQSNNKYAASSYLSLTPEQWKSHRSYSCQVTHEGSTVEKTVAPTECS

SEQ ID NO: 163 - protein, 454 aa, Artificial Sequence
  Description of Artificial Sequence: Synthetic polypeptide
QVQLQQSGPGLVKPSQTLSLTCAISGDSVSSNSAAWNWIRQSPSRGLEWLGRTYYRSKWYNDYAVSVKSRIIINPDTSKNQFSLQLNSVTPEDTAVYYCARDPGGPLDDSFDIWGQGTMVTVSSASTKGPSVFPLAPSSKSTSGGTAALGCLVKDYFPEPVTVSWNSGALTSGVHTFPAVLQSSGLYSLSSVVTVPSSSLGTQTYICNVNHKPSNTKVDKKVEPKSCDKTHTCPPCPAPELLGGPSVFLFPPKPKDTLMISRTPEVTCVVVDVSHEDPEVKFNWYVDGVEVHNAKTKPREEQYNSTYRVVSVLTVLHQDWLNGKEYKCKVSNKALPAPIEKTISKAKGQPREPQVYTLPPSREEMTKNQVSLTCLVKGFYPSDIAVEWESNGQPENNYKTTPPVLDSDGSFFLYSKLTVDKSRWQQGNVFSCSVMHEALHNHYTQKSLSLSPGK

SEQ ID NO: 164 - protein, 220 aa, Artificial Sequence
  Description of Artificial Sequence: Synthetic polypeptide
LDVVMTQSPLSLPVTPGEPASISCRSSQSLLRSNGYNYLDWYLQKPGQSPQLLIYLGSIRASGVPDRFSGSGSGTDFTLRISRVEAEDVGVYYCMQALQTPFTFGQGTKLEIKRTVAAPSVFIFPPSDEQLKSGTASVVCLLNNFYPREAKVQWKVDNALQSGNSQESVTEQDSKDSTYSLSSTLTLSKADYEKHKVYACEVTHQGLSSPVTKSFNRGEC

SEQ ID NO: 165 - protein, 126 aa, Artificial Sequence
  Description of Artificial Sequence: Synthetic polypeptide
IWNIHGKESCDVQLYIKRQSEHSILAGDPFELECPVKYCANRPHVTWCKLNGTTCVKLEDRQTSWKEEKNISFFILHFEPVLPNDNGSYRCSANFQSNLIESHSTTLYVTDVKSASERPSKDEMAS

SEQ ID NO: 166 - protein, 104 aa, Artificial Sequence
  Description of Artificial Sequence: Synthetic polypeptide
KESCDVQLYIKRQSEHSILAGDPFELECPVKYCANRPHVTWCKLNGTTCVKLEDRQTSWKEEKNISFFILHFEPVLPNDNGSYRCSANFQSNLIESHSTTLYVT

SEQ ID NO: 167 - protein, 120 aa, Artificial Sequence
  Description of Artificial Sequence: Synthetic polypeptide
KESCDVQLYIKRQSEHSILAGDPFELECPVKYCANRPHVTWCKLNGTTCVKLEDRQTSWKEEKNISFFILHFEPVLPNDNGSYRCSANFQSNLIESHSTTLYVTDVKSASERPSKDEMAS

SEQ ID NO: 168 - protein, 127 aa, Artificial Sequence
  Description of Artificial Sequence: Synthetic polypeptide
KESCDVQLYIKRQSEHSILAGDPFELECPVKYCANRPHVTWCKLNGTTCVKLEDRQTSWKEEKNISFFILHFEPVLPNDNGSYRCSANFQSNLIESHSTTLYVTDVKSASERPSKDEMASRPWLLYR

SEQ ID NO: 169 - protein, 150 aa, Artificial Sequence [sequence omitted]

SEQ ID NO: 170 - protein, 122 aa, Artificial Sequence
  Description of Artificial Sequence: Synthetic polypeptide
DSPDRPWNPPTFSPALLVVTEGDNATFTCSFSNTSESFHVVWHRESPSGQTDTLAAFPEDRSQPGQDARFRVTQLPNGRDFHMSVVRARRNDSGTYVCGVISLAPKIQIKESLRAELRVTER

SEQ ID NO: 171 - protein, 150 aa, Artificial Sequence
  Description of Artificial Sequence: Synthetic polypeptide
PGWFLDSPDRPWNPPTFSPALLVVTEGDNATFTCSFSNTSESFHVVWHRESPSGQTDTLAAFPEDRSQPGQDARFRVTQLPNGRDFHMSVVRARRNDSGTYVCGVISLAPKIQIKESLRAELRVTERRAEVPTAHPSPSPRPAGQFQTLV

SEQ ID NO: 172 - protein, 530 aa, Artificial Sequence
  Description of Artificial Sequence: Synthetic polypeptide
MDGRFWIRVQESVMVPEGLCISVPCSFSYPRQDWTGSTPAYGYWFKAVTETTKGAPVATNHQSREVEMSTRGRFQLTGDPAKGNCSLVIRDAQMQDESQYFFRVERGSYVRYNFMNDGFFLKVTALTQKPDVYIPETLEPGQPVTVICVFNWAFEECPPPSFSWTGAALSSQGTKPTTSHFSVLSFTPRPQDHNTDLTCHVDFSRKGVSAQRTVRLRVAYAPRDLVISISRDNTPALEPQPQGNVPYLEAQKGQFLRLLCAADSQPPATLSWVLQNRVLSSSHPWGPRPLGLELPGVKAGDSGRYTCRAENRLGSQQRALDLSVQYPPENLRVMVSQANRTVLENLGNGTSLPVLEGQSLCLVCVTHSSPPARLSWTQRGQVLSPSQPSDPGVLELPRVQVEHEGEFTCHARHPLGSQHVSLSLSVHYSPKLLGPSCSWEAEGLHCSCSSQASPAPSLRWWLGEELLEGNSSQDSFEVTPSSAGPWANSSLSLHGGLSSGLRLRCEAWNVHGAQSGSILQLPDKKGLIST

SEQ ID NO: 173 - protein, 118 aa, Artificial Sequence
  Description of Artificial Sequence: Synthetic polypeptide
EEEVQIIQPDKSVSVAAGESAILHCTITSLFPVGPIQWFRGAGPARVLIYNQRQGPFPRVTTISETTRRENMDFSISISNITPADAGTYYCIKFRKGSPDTEFKSGAGTELSVRAKPS

SEQ ID NO: 174 - protein, 119 aa, Artificial Sequence
  Description of Artificial Sequence: Synthetic polypeptide
EEELQVIQPDKSVLVAAGETATLRCTATSLIPVGPIQWFRGAGPGRELIYNQKEGHFPRVTTVSDLTKRNNMDFSIRIGNITPADAGTYYCVKFRKGSPDDVEFKSGAGTELSVRAKPS

SEQ ID NO: 175 - protein, 343 aa, Artificial Sequence
  Description of Artificial Sequence: Synthetic polypeptide
EEELQVIQPDKSVLVAAGETATLRCTATSLIPVGPIQWFRGAGPGRELIYNQKEGHFPRVTTVSDLTKRNNMDFSIRIGNITPADAGTYYCVKFRKGSPDDVEFKSGAGTELSVRAKPSAPVVSGPAARATPQHTVSFTCESHGFSPRDITLKWFKNGNELSDFQTNVDPVGESVSYSIHSTAKVVLTREDVHSQVICEVAHVTLQGDPLRGTANLSETIRVPPTLEVTQQPVRAENQVNVTCQVRKFYPQRLQLTWLENGNVSRTETASTVTENKDGTYNWMSWLLVNVSAHRDDVKLTCQVEHDGQPAVSKSHDLKVSAHPKEQGSNTAAENTGSNERNIY

SEQ ID NO: 176 - protein, 119 aa, Artificial Sequence
  Description of Artificial Sequence: Synthetic polypeptide
EEELQIIQPDKSVLVAAGETATLRCTITSLFPVGPIQWFRGAGPGRVLIYNQRQGPFPRVTTVSDTTKRNNMDFSIRIGNITPADAGTYYCIKFRKGSPDDVEFKSGAGTELSVRAKPS

SEQ ID NO: 177 - protein, 137 aa, Artificial Sequence
  Description of Artificial Sequence: Synthetic polypeptide
TIPPHVQKSVNNDMIVTDNNGAVKFPQLCKFCDVRFSTCDNQKSCMSNCSITSICEKPQEVCVAVWRKNDENITLETVCHDPKLPYHDFILEDAASPKCIMKEKKKPGETFFMCSCSSDECNDNIIFSEEYNTSNPD

SEQ ID NO: 178 - protein, 136 aa, Artificial Sequence
  Description of Artificial Sequence: Synthetic polypeptide
IPPHVQKSVNNDMIVTDNNGAVKFPQLCKFCDVRFSTCDNQKSCMSNCSITSICEKPQEVCVAVWRKNDENITLETVCHDPKLPYHDFILEDAASPKCIMKEKKKPGETFFMCSCSSDECNDNIIFSEEYNTSNPD

SEQ ID NO: 179 - protein, 611 aa, Artificial Sequence
  Description of Artificial Sequence: Synthetic polypeptide
NGAVKFPQLCKFCDVRFSTCDNQKSCMSNCSITSICEKPQEVCVAVWRKNDENITLETVCHDPKLPYHDFILEDAASPKCIMKEKKKPGETFFMCSCSSDECNDNIIFSEEYNTSNPDGLGPVESSPGHGLDTAAAGPEPGALCELSPVSASHPVQALMESFTVLSGCASRGTTGLPQEVHVLNLRTAGQGPGQLQREVTLHLNPISSVHIHHKSVVFLLNSPHPLVWHLKTERLATGVSRLFLVSEGSVVQFSSANFSLTAETEERNFPHGNEHLLNWARKEYGAVTSFTELKIARNIYIKVGEDQVFPPKCNIGKNFLSLNYLAEYLQPKAAEGCVMSSQPQNEEVHIIELITPNSNPYSAFQVDITIDIRPSQEDLEVVKNLILILKCKKSVNWVIKSFDVKGSLKIIAPNSIGFGKESERSMTMTKSIRDDIPSTQGNLVKWALDNGYSPITSYTMAPVANRFHLRLENNAEEMGDEEVHTIPPELRILLDPTCKAQLCKFCDVRFSTCDNQKSCMSNCSITSICEKPQEVCVAVWRKNDENITLETVCHDPKLPYHDFILEDAASPKCIMKEKKKPGETFFMCSCSSDECNDNIIFSEEYNTSNPD

SEQ ID NO: 180 - protein, 610 aa, Artificial Sequence
  Description of Artificial Sequence: Synthetic polypeptide
NGAVKFPQLCKFCDVRFSTCDNQKSCMSNCSITSICEKPQEVCVAVWRKNDENITLETVCHDPKLPYHDFILEDAASPKCIMKEKKKPGETFFMCSCSSDECNDNIIFSEEYNTSNPDGLGPVESSPGHGLDTAAAGPEPSTRCELSPINASHPVQALMESFTVLSGCASHGTTGLPREVHVLNLRSTDQGPGQRQREVTLHLNPIASVHTHHKPIVFLLNSPQPLVWRLKTERLAAGVPRLFLVSEGSVVQFPSGNFSLTAETEERNFPQENEHLLRWAQKEYGAVTSFTELKIARNIYIKVGEDQVFPPTCNIGKNFLSLNYLAEYLQPKAAEGCVLPSQPHEKEVHIIELITPSSNPYSAFQVDIIVDIRPAQEDPEVVKNLVLILKSKKSVNWVIKSFDVKGNLKVIAPNSIGFGKESERSMTMTKLVRDDIPSTQENLMKWALDAGYRPVTSYTMAPVANRFHLRLENNEEMRDEEVHTIPPELRILLDPDKLPQLCKFCDVRFSTCDNQKSCMSNCSITSICEKPQEVCVAVWRKNDENITLETVCHDPKLPYHDFILEDAASPKCIMKEKKKPGETFFMCSCSSDECNDNIIFSEEYNTSNPD

SEQ ID NO: 181 - protein, 181 aa, Artificial Sequence
  Description of Artificial Sequence: Synthetic polypeptide
SEVEYRAEVGQNAYLPCFYTPAAPGNLVPVCWGKGACPVFECGNVVLRTDERDVNYWTSRYWLNGDFRKGDVSLTIENVTLADSGIYCCRIQIPGIMNDEKFNLKLVIKPAKVTPAPTRQRDFTAAFPRMLTTRGHGPAETQTLGSLPDINLTQISTLANELRDSRLANDLRDSGATIRIG

SEQ ID NO: 182 - protein, 181 aa, Artificial Sequence
  Description of Artificial Sequence: Synthetic polypeptide
SEVEYRAEVGQNAYLPCFYTPAAPGNLVPVCWGKGACPVFECGNVVLRTDERDVNYWTSRYWLNGDFRKGDVSLTIENVILADSGIYCCRIQIPGIMNDEKFNLKLVIKPAKVTPAPTRQRDFTAAFPRMLTTRGHGPAETQTLGSLPDINLIQISTLANELRDSRLANDLRDSGATIRIG

SEQ ID NO: 183 - protein, 181 aa, Artificial Sequence
  Description of Artificial Sequence: Synthetic polypeptide
SEVEYRAEVGQNAYLPCFYTPAAPGNLVPVCWGKGACPVFECGNVVLRTDERDVNYWTSRYWLNGDFRKGDVSLTIENVILADSGIYCCRIQIPGIMNDEKFNLKLVIKPAKVTPAPTRQRDFTAAFPRMLTTRGHGPAETQTLGSLPDINLTQISTLANELRDSRLANDLRDSGATIRIG

SEQ ID NO: 184 - protein, 745 aa, Artificial Sequence
  Description of Artificial Sequence: Synthetic polypeptide
ASVGLPSVSLDLPRLSIQKDILTIKANTTLQITCRGQRDLDWLWPNNQSGSEQRVEVTECSDGLFCKTLTIPKVIGNDTGAYKCFYRETDLASVIYVYVQDYRSPFIASVSDQHGVVYITENKNKTVVIPCLGSISNLNVSLCARYPEKRFVPDGNRISWDSKKGFTIPSYMISYAGMVFCEAKINDESYQSIMYIVVVVGYRIYDVVLSPSHGIELSVGEKLVLNCTARTELNVGIDFNWEYPSSKHQHKKLVNRDLKTQSGSEMKKFLSTLTIDGVTRSDQGLYTCAASSGLMTKKNSTFVRVHEKPFVAFGSGMESLVEATVGERVRIPAKYLGYPPPEIKWYKNGIPLESNHTIKAGHVLTIMEVSERDTGNYTVILTNPISKEKQSHVVSLVVYVPPQIGEKSLISPVDSYQYGTTQTLTCTVYAIPPPHHIHWYWQLEEECANEPSQAVSVTNPYPCEEWRSVEDFQGGNKIEVNKNQFALIEGKNKTVSTLVIQAANVSALYKCEAVNKVGRGERVISFHVTRGPEITLQPDMQPTEQESVSLWCTADRSTFENLTWYKLGPQPLPIHVGELPTPVCKNLDTLWKLNATMFSNSTNDILIMELKNASLQDQGDYVCLAQDRKTKKRHCVVRQLTVLERVAPTITGNLENQTTSIGESIEVSCTASGNPPPQIMWFKDNETLVEDSGIVLKDGNRNLTIRRVRKEDEGLYTCQACSVLGCAKVEAFFIIEGAQEKTNLE

SEQ ID NO: 185 - protein, 732 aa, Artificial Sequence
  Description of Artificial Sequence: Synthetic polypeptide
SKLKDPELSLKGTQHIMQAGQTLHLQCRGEAAHKWSLPEMVSKESERLSITKSACGRNGKQFCSTLTLNTAQANHTGFYSCKYLAVPTSKKKETESAIYIFISDTGRPFVEMYSEIPEIIHMTEGRELVIPCRVTSPNITVTLKKFPLDTLIPDGKRIIWDSRKGFIISNATYKEIGLLTCEATVNGHLYKTNYLTHRQTNTIIDVQISTPRPVKLLRGHTLVLNCTATTPLNTRVQMTWSYPDEKNKRASVRRRIDQSNSHANIFYSVLTIDKMQNKDKGLYTCRVRSGPSFKSVNTSVHIYDKAFITVKHRKQQVLETVAGKRSYRLSMKVKAFPSPEVVWLKDGLPATEKSARYLTRGYSLIIKDVTEEDAGNYTILLSIKQSNVFKNLTATLIVNVKPQIYEKAVSSFPDPALYPLGSRQILTCTAYGIPQPTIKWFWHPCNHNHSEARCDFCSNNEESFILDADSNMGNRIESITQRMAIIEGKNKMASTLVVADSRISGIYICIASNKVGTVGRNISFYITDVPNGFHVNLEKMPTEGEDLKLSCTVNKFLYRDVTWILLRTVNNRTMHYSISKQKMAITKEHSITLNLTIMNVSLQDSGTYACRARNVYTGEEILQKKEITIRDQEAPYLLRNLSDHTVAISSSTTLDCHANGVPEPQITWFKNNHKIQQEPGIILGPGSSTLFIERVTEEDEGVYHCKATNQKGSVESSAYLTVQGTSDKSNLE

SEQ ID NO: 186 - protein, 205 aa, Artificial Sequence
  Description of Artificial Sequence: Synthetic polypeptide
SDTGRPFVEMYSEIPEIIHMTEGRELVIPCRVTSPNITVTLKKFPLDTLIPDGKRIIWDSRKGFIISNATYKEIGLLTCEATVNGHLYKTNYLTHRQTNTIIDVVLSPSHGIELSVGEKLVLNCTARTELNVGIDFNWEYPSSKHQHKKLVNRDLKTQSGSEMKKFLSTLTIDGVTRSDQGLYTCAASSGLMTKKNSTFVRVHEK

SEQ ID NO: 187 - protein, 147 aa, Artificial Sequence
  Description of Artificial Sequence: Synthetic polypeptide
EKATKRNDEECEVQLNIKRNSKHSAWTGELFKIECPVKYCVHRPNVTWCKHNGTIWVPLEVGPQLYTSWEENRSVPVFVLHFKPIHLSDNGSYSCSTNFNSQVINSHSVTIHVRERTQNSSEHPLIISDIPDATNASGPSTMEKRPG

SEQ ID NO: 188 - protein, 205 aa, Artificial Sequence
  Description of Artificial Sequence: Synthetic polypeptide
ACPWAVSGARASPGSAASPRLREGPELSPDDPAGLLDLRQGMFAQLVAQNVLLIDGPLSWYSDPGLAGVSLTGGLSYKEDTKELVVAKAGVYYVFFQLELRRVVAGEGSGSVSLALHLQPLRSAAGAAALALTVDLPPASSEARNSAFGFQGRLLHLSAGQRLGVHLHTEARARHAWQLTQGATVLGLFRVTPEIPAGLPSPRSE

SEQ ID NO: 189 - protein, 172 aa, Artificial Sequence
  Description of Artificial Sequence: Synthetic polypeptide
QRTDSIPNSPDNVPLKGGNCSEDLLCILKRAPFKKSWAYLQVAKHLNKTKLSWNKDGILHGVRYQDGNLVIQFPGLYFIICQLQFLVQCPNNSVDLKLELLINKHIKKQALVTVCESGMQTKHVYQNLSQFLLDYLQVNTTISVNVDTFQYIDTSTFPLENVLSIFLYSNSD

SEQ ID NO: 190 - protein, 215 aa, Artificial Sequence
  Description of Artificial Sequence: Synthetic polypeptide
HRRLDKIEDERNLHEDFVFMKTIQRCNTGERSLSLLNCEEIKSQFEGFVKDIMLNKEETKKENSFEMQKGDQNPQIAAHVISEASSKTTSVLQWAEKGYYTMSNNLVTLENGKQLTVKRQGLYYIYAQVTFCSNREASSQAPFIASLCLKSPGRFERILLRAANTHSSAKPCGQQSIHLGGVFELQPGASVFVNVTDPSQVSHGTGFTSFGLLKL

SEQ ID NO: 191 - protein, 146 aa, Artificial Sequence
  Description of Artificial Sequence: Synthetic polypeptide
GDQNPQIAAHVISEASSKTTSVLQWAEKGYYTMSNNLVTLENGKQLTVKRQGLYYIYAQVTFCSNREASSQAPFIASLCLKSPGRFERILLRAANTHSSAKPCGQQSIHLGGVFELQPGASVFVNVTDPSQVSHGTGFTSFGLLKL

SEQ ID NO: 192 - protein, 155 aa, Artificial Sequence
  Description of Artificial Sequence: Synthetic polypeptide
QRFAQAQQQLPLESLGWDVAELQLNHTGPQQDPRLYWQGGPALGRSFLHGPELDKGQLRIHRDGIYMVHIQVTLAICSSTTASRHHPTTLAVGICSPASRSISLLRLSFHQGCTIASQRLTPLARGDTLCTNLTGTLLPSRNTDETFFGVQWVRP

SEQ ID NO: 193 - protein, 128 aa, Artificial Sequence
  Description of Artificial Sequence: Synthetic polypeptide
QLETAKEPCMAKFGPLPSKWQMASSEPPCVNKVSDWKLEILQNGLYLIYGQVAPNANYNDVAPFEVRLYKNKDMIQTLTNKSKIQNVGGTYELHVGDTIDLIFNSEHQVLKNNTYWGIILLANPQFIS

SEQ ID NO: 194 - protein, 240 aa, Artificial Sequence
  Description of Artificial Sequence: Synthetic polypeptide
DTQEKEVRAMVGSDVELSCACPEGSRFDLNDVYVYWQTSESKTVVTYHIPQNSSLENVDSRYRNRALMSPAGMLRGDFSLRLFNVTPQDEQKFHCLVLSQSLGFQEVLSVEVTLHVAANFSVPVVSAPHSPSQDELTFTCTSINGYPRPNVYWINKTDNSLLDQALQNDTVFLNMRGLYDVVSVLRIARTPSVNIGCCIENVLLQQNLTVGSQTGNDIGERDKITENPVSTGEKNAATWS

SEQ ID NO: 195 - protein, 518 aa, Artificial Sequence
  Description of Artificial Sequence: Synthetic polypeptide
IWELKKDVYVVELDWYPDAPGEMVVLTCDTPEEDGITWTLDQSSEVLGSGKTLTIQVKEFGDAGQYTCHKGGEVLSHSLLLLHKKEDGIWSTDILKDQKEPKNKTFLRCEAKNYSGRFTCWWLTTISTDLTFSVKSSRGSSDPQGVTCGAATLSAERVRGDNKEYEYSVECQEDSACPAAEESLPIEVMVDAVHKLKYENYTSSFFIRDIIKPDPPKNLQLKPLKNSRQVEVSWEYPDTWSTPHSYFSLTFCVQVQGKSKREKKDRVFTDKTSATVICRKNASISVRAQDRYYSSSWSEWASVPCSGGGGSGGGGSGGGGSRNLPVATPDPGMFPCLHHSQNLLRAVSNMLQKARQTLEFYPCTSEEIDHEDITKDKTSTVEACLPLELTKNESCLNSRETSFITNGSCLASRKTSFMMALCLSSIYEDLKMYQVEFKTMNAKLLMDPKRQIFLDQNMLAVIDELMQALNFNSETVPQKSSLEEPDFYKTKIKLCILLHAFRIRAVTIDRVMSYLNAS

SEQ ID NO: 196 - protein, 114 aa, Artificial Sequence
  Description of Artificial Sequence: Synthetic polypeptide
NWVNVISDLKKIEDLIQSMHIDATLYTESDVHPSCKVTAMKCFLLELQVISLESGDASIHDTVENLIILANNSLSSNGNVTESGCKECEELEEKNIKEFLQSFVHIVQMFINTS

SEQ ID NO: 197 - protein, 182 aa, Artificial Sequence
  Description of Artificial Sequence: Synthetic polypeptide
LQLHWRLGEMVTRLPDGPAGSWEQLIQERRSHEVNPAAHLTGANSSLTGSGGPLLWETQLGLAFLRGLSYHDGALVVTKAGYYYIYSKVQLGGVGCPLGLASTITHGLYKRTPRYPEELELLVSQQSPCGRATSSSRVWWDSSFLGGVVHLEAGEKVVVRVLDERLVRLRDGTRSYFGAFMV

SEQ ID NO: 198 - protein, 167 aa, Artificial Sequence
  Description of Artificial Sequence: Synthetic polypeptide
DGPAGSWEQLIQERRSHEVNPAAHLTGANSSLTGSGGPLLWETQLGLAFLRGLSYHDGALVVTKAGYYYIYSKVQLGGVGCPLGLASTITHGLYKRTPRYPEELELLVSQQSPCGRATSSSRVWWDSSFLGGVVHLEAGEKVVVRVLDERLVRLRDGTRSYFGAFMV

SEQ ID NO: 199 - protein, 133 aa, Artificial Sequence
  Description of Artificial Sequence: Synthetic polypeptide
QVSHRYPRIQSIKVQFTEYKKEKGFILTSQKEDEIMKVQNNSVIINCDGFYLISLKGYFSQEVNISLHYQKDEEPLFQLKKVRSVNSLMVASLTYKDKVYLNVTTDNTSLDDFHVNGGELILIHQNPGEFCVL

SEQ ID NO: 200 - protein, 15 aa, Artificial Sequence
  Description of Artificial Sequence: Synthetic peptide
GGGGSGGGGSGGGGS

SEQ ID NO: 201 - protein, 20 aa, Artificial Sequence
  Description of Artificial Sequence: Synthetic peptide
GGGGSGGGGSGGGGSGGGGS

SEQ ID NO: 202 - protein, 12 aa, Artificial Sequence
  Description of Artificial Sequence: Synthetic peptide
GSAGSAAGSGEF

SEQ ID NO: 203 - protein, 18 aa, Artificial Sequence
  Description of Artificial Sequence: Synthetic peptide
KESGSVSSEQLAQFRSLD

SEQ ID NO: 204 - protein, 14 aa, Artificial Sequence
  Description of Artificial Sequence: Synthetic peptide
EGKSSGSGSESKST

SEQ ID NO: 205 - protein, 15 aa, Artificial Sequence
  Description of Artificial Sequence: Synthetic peptide
EAAAKEAAAKEAAAK

SEQ ID NO: 206 - protein, 17 aa, Artificial Sequence
  Description of Artificial Sequence: Synthetic peptide
AEAAAKEAAAKEAAAKA

SEQ ID NO: 207 - protein, 14 aa, Artificial Sequence
  Description of Artificial Sequence: Synthetic peptide
APAPAPAPAPAPAP

SEQ ID NO: 208 - protein, 330 aa, Artificial Sequence
  Description of Artificial Sequence: Synthetic polypeptide
ASTKGPSVFPLAPSSKSTSGGTAALGCLVKDYFPEPVTVSWNSGALTSGVHTFPAVLQSSGLYSLSSVVTVPSSSLGTQTYICNVNHKPSNTKVDKKVEPKSCDKTHTCPPCPAPELLGGPSVFLFPPKPKDTLMISRTPEVTCVVVDVSHEDPEVKFNWYVDGVEVHNAKTKPREEQYNSTYRVVSVLTVLHQDWLNGKEYKCKVSNKALPAPIEKTISKAKGQPREPQVYTLPPSREEMTKNQVSLTCLVKGFYPSDIAVEWESNGQPENNYKTTPPVLDSDGSFFLYSKLTVDKSRWQQGNVFSCSVMHEALHNHYTQKSLSLSPGK

SEQ ID NO: 209 - protein, 330 aa, Artificial Sequence
  Description of Artificial Sequence: Synthetic polypeptide
ASTKGPSVFPLAPSSKSTSGGTAALGCLVKDYFPEPVTVSWNSGALTSGVHTFPAVLQSSGLYSLSSVVTVPSSSLGTQTYICNVNHKPSNTKVDKKVEPKSCDKTHTCPPCPAPEAAGGPSVFLFPPKPKDTLMISRTPEVTCVVVDVSHEDPEVKFNWYVDGVEVHNAKTKPREEQYNSTYRVVSVLTVLHQDWLNGKEYKCKVSNKALPAPIEKTISKAKGQPREPQVYTLPPSREEMTKNQVSLTCLVKGFYPSDIAVEWESNGQPENNYKTTPPVLDSDGSFFLYSKLTVDKSRWQQGNVFSCSVMHEALHNHYTQKSLSLSPGK

SEQ ID NO: 210 - protein, 327 aa, Artificial Sequence
  Description of Artificial Sequence: Synthetic polypeptide
ASTKGPSVFPLAPCSRSTSESTAALGCLVKDYFPEPVTVSWNSGALTSGVHTFPAVLQSSGLYSLSSVVTVPSSSLGTKTYTCNVDHKPSNTKVDKRVESKYGPPCPSCPAPEFLGGPSVFLFPPKPKDTLMISRTPEVTCVVVDVSQEDPEVQFNWYVDGVEVHNAKTKPREEQFNSTYRVVSVLTVLHQDWLNGKEYKCKVSNKGLPSSIEKTISKAKGQPREPQVYTLPPSQEEMTKNQVSLTCLVKGFYPSDIAVEWESNGQPENNYKTTPPVLDSDGSFFLYSRLTVDKSRWQEGNVFSCSVMHEALHNHYTQKSLSLSLGK

SEQ ID NO: 211 - protein, 326 aa, Artificial Sequence
  Description of Artificial Sequence: Synthetic polypeptide
ASTKGPSVFPLAPCSRSTSESTAALGCLVKDYFPEPVTVSWNSGALTSGVHTFPAVLQSSGLYSLSSVVTVPSSSLGTKTYTCNVDHKPSNTKVDKRVESKYGPPCPPCPAPEFLGGPSVFLFPPKPKDTLMISRTPEVTCVVVDVSQEDPEVQFNWYVDGVEVHNAKTKPREEQFNSTYRVVSVLTVLHQDWLNGKEYKCKVSNKGLPSSIEKTISKAKGQPREPQVYTLPPSQEEMTKNQVSLTCLVKGFYPSDIAVEWESNGQPENNYKTTPPVLDSDGSFFLYSRLTVDKSRWQQGNVFSCSVMHEALHNHYTQKSLSLSGK

SEQ ID NO: 212 - protein, 107 aa, Artificial Sequence [sequence omitted]

SEQ ID NO: 213 - protein, 105 aa, Artificial Sequence
  Description of Artificial Sequence: Synthetic polypeptide
QPKAAPSVTLFPPSSEELQANKATLVCLISDFYPGAVTVAWKADSSPVKAGVETTTPSKQSNNKYAASSYLSLTPEQWKSHRSYSCQVTHEGSTVEKTVAPTECS

SEQ ID NO: 214 - protein, 504 aa, Artificial Sequence
  Description of Artificial Sequence: Synthetic polypeptide
DIQLTQSPASLAVSLGQRATISCKASQSVDYDGDSYLNWYQQIPGQPPKLLIYDASNLVSGIPPRFSGSGSGTDFTLNIHPVEKVDAATYHCQQSTEDPWTFGGGTKLEIKGGGGSGGGGSGGGGSQVQLQQSGAELVRPGSSVKISCKASGYAFSSYWMNWVKQRPGQGLEWIGQIWPGDGDTNYNGKFKGKATLTADESSSTAYMQLSSLASEDSAVYFCARRETTTVGRYYYAMDYWGQGTTVTVSSGGGGSDIKLQQSGAELARPGASVKMSCKTSGYTFTRYTMHWVKQRPGQGLEWIGYINPSRGYTNYNQKFKDKATLTTDKSSSTAYMQLSSLTSEDSAVYYCARYYDDHYCLDYWGQGTTLTVSSVEGGSGGSGGSGGSGGVDDIQLTQSPAIMSASPGEKVTMTCRASSSVSYMNWYQQKSGTSPKRWIYDTSKVASGVPYRFSGSGSGTSYSLTISSMEAEDAATYYCQQWSSNPLTFGAGTKLELKHHHHHH

SEQ ID NO: 215 - protein, 504 aa, Artificial Sequence
  Description of Artificial Sequence: Synthetic polypeptide
QVQLVESGGGLVKPGESLRLSCAASGFTFSDYYMYWVRQAPGKGLEWVAIISDGGYYTYYSDIIKGRFTISRDNAKNSLYLQMNSLKAEDTAVYYCARGFPLLRHGAMDYWGQGTLVTVSSGGGGSGGGGSGGGGSDIQMTQSPSSLSASVGDRVTITCKASQNVDTNVAWYQQKPGQAPKSLIYSASYRYSDVPSRFSGSASGTDFTLTISSVQSEDFATYYCQQYDSYPYTFGGGTKLEIKSGGGGSEVQLVESGGGLVQPGGSLKLSCAASGFTFNKYAMNWVRQAPGKGLEWVARIRSKYNNYATYYADSVKDRFTISRDDSKNTAYLQMNNLKTEDTAVYYCVRHGNFGNSYISYWAYWGQGTLVTVSSGGGGSGGGGSGGGGSQTVVTQEPSLTVSPGGTVTLTCGSSTGAVTSGNYPNWVQQKPGQAPRGLIGGTKFLAPGTPARFSGSLLGGKAALTLSGVQPEDEAEYYCVLWYSNRWVFGGGTKLTVLHHHHHH

SEQ ID NO: 216 - protein, 451 aa, Artificial Sequence
  Description of Artificial Sequence: Synthetic polypeptide
QVQLVQSGAEVKKPGASVKVSCKASGYTFTEFGMNWVRQAPGQGLEWMGWINTKTGEATYVEEFKGRVTFTTDTSTSTAYMELRSLRSDDTAVYYCARWDFAYYVEAMDYWGQGTTVTVSSASTKGPSVFPLAPSSKSTSGGTAALGCLVKDYFPEPVTVSWNSGALTSGVHTFPAVLQSSGLYSLSSVVTVPSSSLGTQTYICNVNHKPSNTKVDKKVEPKSCDKTHTCPPCPAPEAAGGPSVFLFPPKPKDTLMISRTPEVTCVVVDVSHEDPEVKFNWYVDGVEVHNAKTKPREEQYNSTYRVVSVLTVLHQDWLNGKEYKCKVSNKALGAPIEKTISKAKGQPREPQVCTLPPSRDELTKNQVSLSCAVKGFYPSDIAVEWESNGQPENNYKTTPPVLDSDGSFFLVSKLTVDKSRWQQGNVFSCSVMHEALHNHYTQKSLSLSPGK

SEQ ID NO: 217 - protein, 694 aa, Artificial Sequence
  Description of Artificial Sequence: Synthetic polypeptide
QVQLVQSGAEVKKPGASVKVSCKASGYTFTEFGMNWVRQAPGQGLEWMGWINTKTGEATYVEEFKGRVTFTTDTSTSTAYMELRSLRSDDTAVYYCARWDFAYYVEAMDYWGQGTTVTVSSASTKGPSVFPLAPSSKSTSGGTAALGCLVKDYFPEPVTVSWNSGALTSGVHTFPAVLQSSGLYSLSSVVTVPSSSLGTQTYICNVNHKPSNTKVDKKVEPKSCDGGGGSGGGGSEVQLLESGGGLVQPGGSLRLSCAASGFTFSTYAMNWVRQAPGKGLEWVSRIRSKYNNYATYYADSVKGRFTISRDDSKNTLYLQMNSLRAEDTAVYYCVRHGNFGNSYVSWFAYWGQGTLVTVSSASVAAPSVFIFPPSDEQLKSGTASVVCLLNNFYPREAKVQWKVDNALQSGNSQESVTEQDSKDSTYSLSSTLTLSKADYEKHKVYACEVTHQGLSSPVTKSFNRGECDKTHTCPPCPAPEAAGGPSVFLFPPKPKDTLMISRTPEVTCVVVDVSHEDPEVKFNWYVDGVEVHNAKTKPREEQYNSTYRVVSVLTVLHQDWLNGKEYKCKVSNKALGAPIEKTISKAKGQPREPQVYTLPPCRDELTKNQVSLWCLVKGFYPSDIAVEWESNGQPENNYKTTPPVLDSDGSFFLYSKLTVDKSRWQQGNVFSCSVMHEALHNHYTQKSLSLSPGK

SEQ ID NO: 218 - protein, 215 aa, Artificial Sequence
  Description of Artificial Sequence: Synthetic polypeptide
DIQMTQSPSSLSASVGDRVTITCKASAAVGTYVAWYQQKPGKAPKLLIYSASYRKRGVPSRFSGSGSGTDFTLTISSLQPEDFATYYCHQYYTYPLFTFGQGTKLEIKRTVAAPSVFIFPPSDEQLKSGTASVVCLLNNFYPREAKVQWKVDNALQSGNSQESVTEQDSKDSTYSLSSTLTLSKADYEKHKVYACEVTHQGLSSPVTKSFNRGEC

SEQ ID NO: 219 - protein, 214 aa, Artificial Sequence
  Description of Artificial Sequence: Synthetic polypeptide
QAVVTQEPSLTVSPGGTVTLTCGSSTGAVTTSNYANWVQEKPGQAFRGLIGGTNKRAPGTPARFSGSLLGGKAALTLSGAQPEDEAEYYCALWYSNLWVFGGGTKLTVLSSASTKGPSVFPLAPSSKSTSGGTAALGCLVKDYFPEPVTVSWNSGALTSGVHTFPAVLQSSGLYSLSSVVTVPSSSLGTQTYICNVNHKPSNTKVDKKVEPKSC

SEQ ID NO: 220 - protein, 584 aa, Artificial Sequence
  Description of Artificial Sequence: Synthetic polypeptide
QVQLKQSGPGLVQPSQSLSITCTVSGFSLTNYGVHWVRQSPGKGLEWLGVIWSGGNTDYNTPFTSRLSINKDNSKSQVFFKMNSLQSNDTAIYYCARALTYYDYEFAYWGQGTLVTVSAASTKGPSVFPLAPSSKSTSGGTAALGCLVKDYFPEPVTVSWNSGALTSGVHTFPAVLQSSGLYSLSSVVTVPSSSLGTQTYICNVNHKPSNTKVDKRVEPKSCDKTHTCPPCPAPELLGGPSVFLFPPKPKDTLMISRTPEVTCVVVDVSHEDPEVKFNWYVDGVEVHNAKTKPREEQYNSTYRVVSVLTVLHQDWLNGKEYKCKVSNKALPAPIEKTISKAKGQPREPQVYTLPPSRDELTKNQVSLTCLVKGFYPSDIAVEWESNGQPENNYKTTPPVLDSDGSFFLYSKLTVDKSRWQQGNVFSCSVMHEALHNHYTQKSLSLSPGKGGGGSGGGGSGGGGSKESCDVQLYIKRQSEHSILAGDPFELECPVKYCANRPHVTWCKLNGTTCVKLEDRQTSWKEEKNISFFILHFEPVLPNDNGSYRCSANFQSNLIESHSTTLYVTDVKSASERPSKDEMAS

SEQ ID NO: 221 - protein, 379 aa, Artificial Sequence
  Description of Artificial Sequence: Synthetic polypeptide
DILLTQSPVILSVSPGERVSFSCRASQSIGTNIHWYQQRTNGSPRLLIKYASESISGIPSRFSGSGSGTDFTLSINSVESEDIADYYCQQNNNWPTTFGAGTKLELKRTVAAPSVFIFPPSDEQLKSGTASVVCLLNNFYPREAKVQWKVDNALQSGNSQESVTEQDSKDSTYSLSSTLTLSKADYEKHKVYACEVTHQGLSSPVTKSFNRGECGGGGSGGGGSGGGGSPGWFLDSPDRPWNPPTFSPALLVVTEGDNATFTCSFSNTSESFVLNWYRMSPSNQTDKLAAFPEDRSQPGQDCRFRVTQLPNGRDFHMSVVRARRNDSGTYLCGAISLAPKAQIKESLRAELRVTERRAEVPTAHPSPSPRPAGQFQTLV

SEQ ID NO: 222 - protein, 759 aa, Artificial Sequence
  Description of Artificial Sequence: Synthetic polypeptide
DILLTQSPVILSVSPGERVSFSCRASQSIGTNIHWYQQRTNGSPRLLIKYASESISGIPSRFSGSGSGTDFTLSINSVESEDIADYYCQQNNNWPTTFGAGTKLELKRTVAAPSVFIFPPSDEQLKSGTASVVCLLNNFYPREAKVQWKVDNALQSGNSQESVTEQDSKDSTYSLSSTLTLSKADYEKHKVYACEVTHQGLSSPVTKSFNRGECGGGGSGGGGSGGGGSMDGRFWIRVQESVMVPEGLCISVPCSFSYPRQDWTGSTPAYGYWFKAVTETTKGAPVATNHQSREVEMSTRGRFQLTGDPAKGNCSLVIRDAQMQDESQYFFRVERGSYVRYNFMNDGFFLKVTALTQKPDVYIPETLEPGQPVTVICVFNWAFEECPPPSFSWTGAALSSQGTKPTTSHFSVLSFTPRPQDHNTDLTCHVDFSRKGVSAQRTVRLRVAYAPRDLVISISRDNTPALEPQPQGNVPYLEAQKGQFLRLLCAADSQPPATLSWVLQNRVLSSSHPWGPRPLGLELPGVKAGDSGRYTCRAENRLGSQQRALDLSVQYPPENLRVMVSQANRTVLENLGNGTSLPVLEGQSLCLVCVTHSSPPARLSWTQRGQVLSPSQPSDPGVLELPRVQVEHEGEFTCHARHPLGSQHVSLSLSVHYSPKLLGPSCSWEAEGLHCSCSSQASPAPSLRWWLGEELLEGNSSQDSFEVTPSSAGPWANSSLSLHGGLSSGLRLRCEAWNVHGAQSGSILQLPDKKGLIST

SEQ ID NO: 223 - protein, 348 aa, Artificial Sequence
  Description of Artificial Sequence: Synthetic polypeptide
DILLTQSPVILSVSPGERVSFSCRASQSIGTNIHWYQQRTNGSPRLLIKYASESISGIPSRFSGSGSGTDFTLSINSVESEDIADYYCQQNNNWPTTFGAGTKLELKRTVAAPSVFIFPPSDEQLKSGTASVVCLLNNFYPREAKVQWKVDNALQSGNSQESVTEQDSKDSTYSLSSTLTLSKADYEKHKVYACEVTHQGLSSPVTKSFNRGECGGGGSGGGGSGGGGSEEELQVIQPDKSVLVAAGETATLRCTATSLIPVGPIQWFRGAGPGRELIYNQKEGHFPRVTTVSDLTKRNNMDFSIRIGNITPADAGTYYCVKFRKGSPDDVEFKSGAGTELSVRAKPS

SEQ ID NO: 224 - protein, 410 aa, Artificial Sequence
  Description of Artificial Sequence: Synthetic polypeptide
DILLTQSPVILSVSPGERVSFSCRASQSIGTNIHWYQQRTNGSPRLLIKYASESISGIPSRFSGSGSGTDFTLSINSVESEDIADYYCQQNNNWPTTFGAGTKLELKRTVAAPSVFIFPPSDEQLKSGTASVVCLLNNFYPREAKVQWKVDNALQSGNSQESVTEQDSKDSTYSLSSTLTLSKADYEKHKVYACEVTHQGLSSPVTKSFNRGECGGGGSGGGGSGGGGSSEVEYRAEVGQNAYLPCFYTPAAPGNLVPVCWGKGACPVFECGNVVLRTDERDVNYWTSRYWLNGDFRKGDVSLTIENVTLADSGIYCCRIQIPGIMNDEKFNLKLVIKPAKVTPAPTRQRDFTAAFPRMLTTRGHGPAETQTLGSLPDINLTQISTLANELRDSRLANDLRDSGATIRIG

SEQ ID NO: 225 - protein, 614 aa, Artificial Sequence
  Description of Artificial Sequence: Synthetic polypeptide
QVQLKQSGPGLVQPSQSLSITCTVSGFSLTNYGVHWVRQSPGKGLEWLGVIWSGGNTDYNTPFTSRLSINKDNSKSQVFFKMNSLQSNDTAIYYCARALTYYDYEFAYWGQGTLVTVSAASTKGPSVFPLAPSSKSTSGGTAALGCLVKDYFPEPVTVSWNSGALTSGVHTFPAVLQSSGLYSLSSVVTVPSSSLGTQTYICNVNHKPSNTKVDKRVEPKSCDKTHTCPPCPAPELLGGPSVFLFPPKPKDTLMISRTPEVTCVVVDVSHEDPEVKFNWYVDGVEVHNAKTKPREEQYNSTYRVVSVLTVLHQDWLNGKEYKCKVSNKALPAPIEKTISKAKGQPREPQVYTLPPSRDELTKNQVSLTCLVKGFYPSDIAVEWESNGQPENNYKTTPPVLDSDGSFFLYSKLTVDKSRWQQGNVFSCSVMHEALHNHYTQKSLSLSPGKGGGGSGGGGSGGGGSPGWFLDSPDRPWNPPTFSPALLVVTEGDNATFTCSFSNTSESFVLNWYRMSPSNQTDKLAAFPEDRSQPGQDCRFRVTQLPNGRDFHMSVVRARRNDSGTYLCGAISLAPKAQIKESLRAELRVTERRAEVPTAHPSPSPRPAGQFQTLV

SEQ ID NO: 226 - protein, 349 aa, Artificial Sequence
  Description of Artificial Sequence: Synthetic polypeptide
DILLTQSPVILSVSPGERVSFSCRASQSIGTNIHWYQQRTNGSPRLLIKYASESISGIPSRFSGSGSGTDFTLSINSVESEDIADYYCQQNNNWPTTFGAGTKLELKRTVAAPSVFIFPPSDEQLKSGTASVVCLLNNFYPREAKVQWKVDNALQSGNSQESVTEQDSKDSTYSLSSTLTLSKADYEKHKVYACEVTHQGLSSPVTKSFNRGECGGGGSGGGGSGGGGSKESCDVQLYIKRQSEHSILAGDPFELECPVKYCANRPHVTWCKLNGTTCVKLEDRQTSWKEEKNISFFILHFEPVLPNDNGSYRCSANFQSNLIESHSTTLYVTDVKSASERPSKDEMAS

SEQ ID NO: 227 - protein, 994 aa, Artificial Sequence
  Description of Artificial Sequence: Synthetic polypeptide
QVQLKQSGPGLVQPSQSLSITCTVSGFSLTNYGVHWVRQSPGKGLEWLGVIWSGGNTDYNTPFTSRLSINKDNSKSQVFFKMNSLQSNDTAIYYCARALTYYDYEFAYWGQGTLVTVSAASTKGPSVFPLAPSSKSTSGGTAALGCLVKDYFPEPVTVSWNSGALTSGVHTFPAVLQSSGLYSLSSVVTVPSSSLGTQTYICNVNHKPSNTKVDKRVEPKSCDKTHTCPPCPAPELLGGPSVFLFPPKPKDTLMISRTPEVTCVVVDVSHEDPEVKFNWYVDGVEVHNAKTKPREEQYNSTYRVVSVLTVLHQDWLNGKEYKCKVSNKALPAPIEKTISKAKGQPREPQVYTLPPSRDELTKNQVSLTCLVKGFYPSDIAVEWESNGQPENNYKTTPPVLDSDGSFFLYSKLTVDKSRWQQGNVFSCSVMHEALHNHYTQKSLSLSPGKGGGGSGGGGSGGGGSMDGRFWIRVQESVMVPEGLCISVPCSFSYPRQDWTGSTPAYGYWFKAVTETTKGAPVATNHQSREVEMSTRGRFQLTGDPAKGNCSLVIRDAQMQDESQYFFRVERGSYVRYNFMNDGFFLKVTALTQKPDVYIPETLEPGQPVTVICVFNWAFEECPPPSFSWTGAALSSQGTKPTTSHFSVLSFTPRPQDHNTDLTCHVDFSRKGVSAQRTVRLRVAYAPRDLVISISRDNTPALEPQPQGNVPYLEAQKGQFLRLLCAADSQPPATLSWVLQNRVLSSSHPWGPRPLGLELPGVKAGDSGRYTCRAENRLGSQQRALDLSVQYPPENLRVMVSQANRTVLENLGNGTSLPVLEGQSLCLVCVTHSSPPARLSWTQRGQVLSPSQPSDPGVLELPRVQVEHEGEFTCHARHPLGSQHVSLSLSVHYSPKLLGPSCSWEAEGLHCSCSSQASPAPSLRWWLGEELLEGNSSQDSFEVTPSSAGPWANSSLSLHGGLSSGLRLRCEAWNVHGAQSGSILQLPDKKGLIST

SEQ ID NO: 228 - protein, 583 aa, Artificial Sequence
  Description of Artificial Sequence: Synthetic polypeptide
QVQLKQSGPGLVQPSQSLSITCTVSGFSLTNYGVHWVRQSPGKGLEWLGVIWSGGNTDYNTPFTSRLSINKDNSKSQVFFKMNSLQSNDTAIYYCARALTYYDYEFAYWGQGTLVTVSAASTKGPSVFPLAPSSKSTSGGTAALGCLVKDYFPEPVTVSWNSGALTSGVHTFPAVLQSSGLYSLSSVVTVPSSSLGTQTYICNVNHKPSNTKVDKRVEPKSCDKTHTCPPCPAPELLGGPSVFLFPPKPKDTLMISRTPEVTCVVVDVSHEDPEVKFNWYVDGVEVHNAKTKPREEQYNSTYRVVSVLTVLHQDWLNGKEYKCKVSNKALPAPIEKTISKAKGQPREPQVYTLPPSRDELTKNQVSLTCLVKGFYPSDIAVEWESNGQPENNYKTTPPVLDSDGSFFLYSKLTVDKSRWQQGNVFSCSVMHEALHNHYTQKSLSLSPGKGGGGSGGGGSGGGGSEEELQVIQPDKSVLVAAGETATLRCTATSLIPVGPIQWFRGAGPGRELIYNQKEGHFPRVTTVSDLTKRNNMDFSIRIGNITPADAGTYYCVKFRKGSPDDVEFKSGAGTELSVRAKPS

SEQ ID NO: 229 - protein, 601 aa, Artificial Sequence
  Description of Artificial Sequence: Synthetic polypeptide
QVQLKQSGPGLVQPSQSLSITCTVSGFSLTNYGVHWVRQSPGKGLEWLGVIWSGGNTDYNTPFTSRLSINKDNSKSQVFFKMNSLQSNDTAIYYCARALTYYDYEFAYWGQGTLVTVSAASTKGPSVFPLAPSSKSTSGGTAALGCLVKDYFPEPVTVSWNSGALTSGVHTFPAVLQSSGLYSLSSVVTVPSSSLGTQTYICNVNHKPSNTKVDKRVEPKSCDKTHTCPPCPAPELLGGPSVFLFPPKPKDTLMISRTPEVTCVVVDVSHEDPEVKFNWYVDGVEVHNAKTKPREEQYNSTYRVVSVLTVLHQDWLNGKEYKCKVSNKALPAPIEKTISKAKGQPREPQVYTLPPSRDELTKNQVSLTCLVKGFYPSDIAVEWESNGQPENNYKTTPPVLDSDGSFFLYSKLTVDKSRWQQGNVFSCSVMHEALHNHYTQKSLSLSPGKGGGGSGGGGSGGGGSTIPPHVQKSVNNDMIVTDNNGAVKFPQLCKFCDVRFSTCDNQKSCMSNCSITSICEKPQEVCVAVWRKNDENITLETVCHDPKLPYHDFILEDAASPKCIMKEKKKPGETFFMCSCSSDECNDNIIFSEEYNTSNPD

SEQ ID NO: 230 - protein, 645 aa, Artificial Sequence
  Description of Artificial Sequence: Synthetic polypeptide
QVQLKQSGPGLVQPSQSLSITCTVSGFSLTNYGVHWVRQSPGKGLEWLGVIWSGGNTDYNTPFTSRLSINKDNSKSQVFFKMNSLQSNDTAIYYCARALTYYDYEFAYWGQGTLVTVSAASTKGPSVFPLAPSSKSTSGGTAALGCLVKDYFPEPVTVSWNSGALTSGVHTFPAVLQSSGLYSLSSVVTVPSSSLGTQTYICNVNHKPSNTKVDKRVEPKSCDKTHTCPPCPAPELLGGPSVFLFPPKPKDTLMISRTPEVTCVVVDVSHEDPEVKFNWYVDGVEVHNAKTKPREEQYNSTYRVVSVLTVLHQDWLNGKEYKCKVSNKALPAPIEKTISKAKGQPREPQVYTLPPSRDELTKNQVSLTCLVKGFYPSDIAVEWESNGQPENNYKTTPPVLDSDGSFFLYSKLTVDKSRWQQGNVFSCSVMHEALHNHYTQKSLSLSPGKGGGGSGGGGSGGGGSSEVEYRAEVGQNAYLPCFYTPAAPGNLVPVCWGKGACPVFECGNVVLRTDERDVNYWTSRYWLNGDFRKGDVSLTIENVTLADSGIYCCRIQIPGIMNDEKFNLKLVIKPAKVTPAPTRQRDFTAAFPRMLTTRGHGPAETQTLGSLPDINLTQISTLANELRDSRLANDLRDSGATIRIG

SEQ ID NO: 231 - protein, 669 aa, Artificial Sequence
  Description of Artificial Sequence: Synthetic polypeptide
QVQLKQSGPGLVQPSQSLSITCTVSGFSLTNYGVHWVRQSPGKGLEWLGVIWSGGNTDYNTPFTSRLSINKDNSKSQVFFKMNSLQSNDTAIYYCARALTYYDYEFAYWGQGTLVTVSAASTKGPSVFPLAPSSKSTSGGTAALGCLVKDYFPEPVTVSWNSGALTSGVHTFPAVLQSSGLYSLSSVVTVPSSSLGTQTYICNVNHKPSNTKVDKRVEPKSCDKTHTCPPCPAPELLGGPSVFLFPPKPKDTLMISRTPEVTCVVVDVSHEDPEVKFNWYVDGVEVHNAKTKPREEQYNSTYRVVSVLTVLHQDWLNGKEYKCKVSNKALPAPIEKTISKAKGQPREPQVYTLPPSRDELTKNQVSLTCLVKGFYPSDIAVEWESNGQPENNYKTTPPVLDSDGSFFLYSKLTVDKSRWQQGNVFSCSVMHEALHNHYTQKSLSLSPGKGGGGSGGGGSGGGGSSDTGRPFVEMYSEIPEIIHMTEGRELVIPCRVTSPNITVTLKKFPLDTLIPDGKRIIWDSRKGFIISNATYKEIGLLTCEATVNGHLYKTNYLTHRQTNTIIDVVLSPSHGIELSVGEKLVLNCTARTELNVGIDFNWEYPSSKHQHKKLVNRDLKTQSGSEMKKFLSTLTIDGVTRSDQGLYTCAASSGLMTKKNSTFVRVHEK

SEQ ID NO: 232 - protein, 581 aa, Artificial Sequence
  Description of Artificial Sequence: Synthetic polypeptide
QVQLQESGPGLVKPSQTLSLTCTVSGYSISSDFAWNWIRQPPGKGLEWMGYISYSGNTRYQPSLKSRITISRDTSKNQFFLKLNSVTAADTATYYCVTAGRGFPYWGQGTLVTVSSASTKGPSVFPLAPSSKSTSGGTAALGCLVKDYFPEPVTVSWNSGALTSGVHTFPAVLQSSGLYSLSSVVTVPSSSLGTQTYICNVNHKPSNTKVDKKVEPKSCDKTHTCPPCPAPELLGGPSVFLFPPKPKDTLMISRTPEVTCVVVDVSHEDPEVKFNWYVDGVEVHNAKTKPREEQYNSTYRVVSVLTVLHQDWLNGKEYKCKVSNKALPAPIEKTISKAKGQPREPQVYTLPPSRDELTKNQVSLTCLVKGFYPSDIAVEWESNGQPENNYKTTPPVLDSDGSFFLYSKLTVDKSRWQQGNVFSCSVMHEALHNHYTQKSLSLSPGKGGGGSGGGGSGGGGSKESCDVQLYIKRQSEHSILAGDPFELECPVKYCANRPHVTWCKLNGTTCVKLEDRQTSWKEEKNISFFILHFEPVLPNDNGSYRCSANFQSNLIESHSTTLYVTDVKSASERPSKDEMAS

SEQ ID NO: 233 - protein, 379 aa, Artificial Sequence
  Description of Artificial Sequence: Synthetic polypeptide
DIQMTQSPSSMSVSVGDRVTITCHSSQDINSNIGWLQQKPGKSFKGLIYHGTNLDDGVPSRFSGSGSGTDYTLTISSLQPEDFATYYCVQYAQFPWTFGGGTKLEIKRTVAAPSVFIFPPSDEQLKSGTASVVCLLNNFYPREAKVQWKVDNALQSGNSQESVTEQDSKDSTYSLSSTLTLSKADYEKHKVYACEVTHQGLSSPVTKSFNRGECGGGGSGGGGSGGGGSPGWFLDSPDRPWNPPTFSPALLVVTEGDNATFTCSFSNTSESFVLNWYRMSPSNQTDKLAAFPEDRSQPGQDCRFRVTQLPNGRDFHMSVVRARRNDSGTYLCGAISLAPKAQIKESLRAELRVTERRAEVPTAHPSPSPRPAGQFQTLV

SEQ ID NO: 234 - protein, 759 aa, Artificial Sequence
  Description of Artificial Sequence: Synthetic polypeptide
DIQMTQSPSSMSVSVGDRVTITCHSSQDINSNIGWLQQKPGKSFKGLIYHGTNLDDGVPSRFSGSGSGTDYTLTISSLQPEDFATYYCVQYAQFPWTFGGGTKLEIKRTVAAPSVFIFPPSDEQLKSGTASVVCLLNNFYPREAKVQWKVDNALQSGNSQESVTEQDSKDSTYSLSSTLTLSKADYEKHKVYACEVTHQGLSSPVTKSFNRGECGGGGSGGGGSGGGGSMDGRFWIRVQESVMVPEGLCISVPCSFSYPRQDWTGSTPAYGYWFKAVTETTKGAPVATNHQSREVEMSTRGRFQLTGDPAKGNCSLVIRDAQMQDESQYFFRVERGSYVRYNFMNDGFFLKVTALTQKPDVYIPETLEPGQPVTVICVFNWAFEECPPPSFSWTGAALSSQGTKPTTSHFSVLSFTPRPQDHNTDLTCHVDFSRKGVSAQRTVRLRVAYAPRDLVISISRDNTPALEPQPQGNVPYLEAQKGQFLRLLCAADSQPPATLSWVLQNRVLSSSHPWGPRPLGLELPGVKAGDSGRYTCRAENRLGSQQRALDLSVQYPPENLRVMVSQANRTVLENLGNGTSLPVLEGQSLCLVCVTHSSPPARLSWTQRGQVLSPSQPSDPGVLELPRVQVEHEGEFTCHARHPLGSQHVSLSLSVHYSPKLLGPSCSWEAEGLHCSCSSQASPAPSLRWWLGEELLEGNSSQDSFEVTPSSAGPWANSSLSLHGGLSSGLRLRCEAWNVHGAQSGSILQLPDKKGLIST

SEQ ID NO: 235 - protein, 348 aa, Artificial Sequence
  Description of Artificial Sequence: Synthetic polypeptide
DIQMTQSPSSMSVSVGDRVTITCHSSQDINSNIGWLQQKPGKSFKGLIYHGTNLDDGVPSRFSGSGSGTDYTLTISSLQPEDFATYYCVQYAQFPWTFGGGTKLEIKRTVAAPSVFIFPPSDEQLKSGTASVVCLLNNFYPREAKVQWKVDNALQSGNSQESVTEQDSKDSTYSLSSTLTLSKADYEKHKVYACEVTHQGLSSPVTKSFNRGECGGGGSGGGGSGGGGSEEELQVIQPDKSVLVAAGETATLRCTATSLIPVGPIQWFRGAGPGRELIYNQKEGHFPRVTTVSDLTKRNNMDFSIRIGNITPADAGTYYCVKFRKGSPDDVEFKSGAGTELSVRAKPS

SEQ ID NO: 236 - protein, 410 aa, Artificial Sequence
  Description of Artificial Sequence: Synthetic polypeptide
DIQMTQSPSSMSVSVGDRVTITCHSSQDINSNIGWLQQKPGKSFKGLIYHGTNLDDGVPSRFSGSGSGTDYTLTISSLQPEDFATYYCVQYAQFPWTFGGGTKLEIKRTVAAPSVFIFPPSDEQLKSGTASVVCLLNNFYPREAKVQWKVDNALQSGNSQESVTEQDSKDSTYSLSSTLTLSKADYEKHKVYACEVTHQGLSSPVTKSFNRGECGGGGSGGGGSGGGGSSEVEYRAEVGQNAYLPCFYTPAAPGNLVPVCWGKGACPVFECGNVVLRTDERDVNYWTSRYWLNGDFRKGDVSLTIENVTLADSGIYCCRIQIPGIMNDEKFNLKLVIKPAKVTPAPTRQRDFTAAFPRMLTTRGHGPAETQTLGSLPDINLTQISTLANELRDSRLANDLRDSGATIRIG

SEQ ID NO: 237 - protein, 611 aa, Artificial Sequence
  Description of Artificial Sequence: Synthetic polypeptide
QVQLQESGPGLVKPSQTLSLTCTVSGYSISSDFAWNWIRQPPGKGLEWMGYISYSGNTRYQPSLKSRITISRDTSKNQFFLKLNSVTAADTATYYCVTAGRGFPYWGQGTLVTVSSASTKGPSVFPLAPSSKSTSGGTAALGCLVKDYFPEPVTVSWNSGALTSGVHTFPAVLQSSGLYSLSSVVTVPSSSLGTQTYICNVNHKPSNTKVDKKVEPKSCDKTHTCPPCPAPELLGGPSVFLFPPKPKDTLMISRTPEVTCVVVDVSHEDPEVKFNWYVDGVEVHNAKTKPREEQYNSTYRVVSVLTVLHQDWLNGKEYKCKVSNKALPAPIEKTISKAKGQPREPQVYTLPPSRDELTKNQVSLTCLVKGFYPSDIAVEWESNGQPENNYKTTPPVLDSDGSFFLYSKLTVDKSRWQQGNVFSCSVMHEALHNHYTQKSLSLSPGKGGGGSGGGGSGGGGSPGWFLDSPDRPWNPPTFSPALLVVTEGDNATFTCSFSNTSESFVLNWYRMSPSNQTDKLAAFPEDRSQPGQDCRFRVTQLPNGRDFHMSVVRARRNDSGTYLCGAISLAPKAQIKESLRAELRVTERRAEVPTAHPSPSPRPAGQFQTLV

SEQ ID NO: 238 - protein, 349 aa, Artificial Sequence
  Description of Artificial Sequence: Synthetic polypeptide
DIQMTQSPSSMSVSVGDRVTITCHSSQDINSNIGWLQQKPGKSFKGLIYHGTNLDDGVPSRFSGSGSGTDYTLTISSLQPEDFATYYCVQYAQFPWTFGGGTKLEIKRTVAAPSVFIFPPSDEQLKSGTASVVCLLNNFYPREAKVQWKVDNALQSGNSQESVTEQDSKDSTYSLSSTLTLSKADYEKHKVYACEVTHQGLSSPVTKSFNRGECGGGGSGGGGSGGGGSKESCDVQLYIKRQSEHSILAGDPFELECPVKYCANRPHVTWCKLNGTTCVKLEDRQTSWKEEKNISFFILHFEPVLPNDNGSYRCSANFQSNLIESHSTTLYVTDVKSASERPSKDEMAS

SEQ ID NO: 239 - protein, 991 aa, Artificial Sequence
  Description of Artificial Sequence: Synthetic polypeptide
QVQLQESGPGLVKPSQTLSLTCTVSGYSISSDFAWNWIRQPPGKGLEWMGYISYSGNTRYQPSLKSRITISRDTSKNQFFLKLNSVTAADTATYYCVTAGRGFPYWGQGTLVTVSSASTKGPSVFPLAPSSKSTSGGTAALGCLVKDYFPEPVTVSWNSGALTSGVHTFPAVLQSSGLYSLSSVVTVPSSSLGTQTYICNVNHKPSNTKVDKKVEPKSCDKTHTCPPCPAPELLGGPSVFLFPPKPKDTLMISRTPEVTCVVVDVSHEDPEVKFNWYVDGVEVHNAKTKPREEQYNSTYRVVSVLTVLHQDWLNGKEYKCKVSNKALPAPIEKTISKAKGQPREPQVYTLPPSRDELTKNQVSLTCLVKGFYPSDIAVEWESNGQPENNYKTTPPVLDSDGSFFLYSKLTVDKSRWQQGNVFSCSVMHEALHNHYTQKSLSLSPGKGGGGSGGGGSGGGGSMDGRFWIRVQESVMVPEGLCISVPCSFSYPRQDWTGSTPAYGYWFKAVTETTKGAPVATNHQSREVEMSTRGRFQLTGDPAKGNCSLVIRDAQMQDESQYFFRVERGSYVRYNFMNDGFFLKVTALTQKPDVYIPETLEPGQPVTVICVFNWAFEECPPPSFSWTGAALSSQGTKPTTSHFSVLSFTPRPQDHNTDLTCHVDFSRKGVSAQRTVRLRVAYAPRDLVISISRDNTPALEPQPQGNVPYLEAQKGQFLRLLCAADSQPPATLSWVLQNRVLSSSHPWGPRPLGLELPGVKAGDSGRYTCRAENRLGSQQRALDLSVQYPPENLRVMVSQANRTVLENLGNGTSLPVLEGQSLCLVCVTHSSPPARLSWTQRGQVLSPSQPSDPGVLELPRVQVEHEGEFTCHARHPLGSQHVSLSLSVHYSPKLLGPSCSWEAEGLHCSCSSQASPAPSLRWWLGEELLEGNSSQDSFEVTPSSAGPWANSSLSLHGGLSSGLRLRCEAWNVHGAQSGSILQLPDKKGLIST

SEQ ID NO: 240 - protein, 580 aa, Artificial Sequence
  Description of Artificial Sequence: Synthetic polypeptide
QVQLQESGPGLVKPSQTLSLTCTVSGYSISSDFAWNWIRQPPGKGLEWMGYISYSGNTRYQPSLKSRITISRDTSKNQFFLKLNSVTAADTATYYCVTAGRGFPYWGQGTLVTVSSASTKGPSVFPLAPSSKSTSGGTAALGCLVKDYFPEPVTVSWNSGALTSGVHTFPAVLQSSGLYSLSSVVTVPSSSLGTQTYICNVNHKPSNTKVDKKVEPKSCDKTHTCPPCPAPELLGGPSVFLFPPKPKDTLMISRTPEVTCVVVDVSHEDPEVKFNWYVDGVEVHNAKTKPREEQYNSTYRVVSVLTVLHQDWLNGKEYKCKVSNKALPAPIEKTISKAKGQPREPQVYTLPPSRDELTKNQVSLTCLVKGFYPSDIAVEWESNGQPENNYKTTPPVLDSDGSFFLYSKLTVDKSRWQQGNVFSCSVMHEALHNHYTQKSLSLSPGKGGGGSGGGGSGGGGSEEELQVIQPDKSVLVAAGETATLRCTATSLIPVGPIQWFRGAGPGRELIYNQKEGHFPRVTTVSDLTKRNNMDFSIRIGNITPADAGTYYCVKFRKGSPDDVEFKSGAGTELSVRAKPS

SEQ ID NO: 241 - protein, 598 aa, Artificial Sequence
  Description of Artificial Sequence: Synthetic polypeptide
QVQLQESGPGLVKPSQTLSLTCTVSGYSISSDFAWNWIRQPPGKGLEWMGYISYSGNTRYQPSLKSRITISRDTSKNQFFLKLNSVTAADTATYYCVTAGRGFPYWGQGTLVTVSSASTKGPSVFPLAPSSKSTSGGTAALGCLVKDYFPEPVTVSWNSGALTSGVHTFPAVLQSSGLYSLSSVVTVPSSSLGTQTYICNVNHKPSNTKVDKKVEPKSCDKTHTCPPCPAPELLGGPSVFLFPPKPKDTLMISRTPEVTCVVVDVSHEDPEVKFNWYVDGVEVHNAKTKPREEQYNSTYRVVSVLTVLHQDWLNGKEYKCKVSNKALPAPIEKTISKAKGQPREPQVYTLPPSRDELTKNQVSLTCLVKGFYPSDIAVEWESNGQPENNYKTTPPVLDSDGSFFLYSKLTVDKSRWQQGNVFSCSVMHEALHNHYTQKSLSLSPGKGGGGSGGGGSGGGGSTIPPHVQKSVNNDMIVTDNNGAVKFPQLCKFCDVRFSTCDNQKSCMSNCSITSICEKPQEVCVAVWRKNDENITLETVCHDPKLPYHDFILEDAASPKCIMKEKKKPGETFFMCSCSSDECNDNIIFSEEYNTSNPD

SEQ ID NO: 242 - protein, 642 aa, Artificial Sequence
  Description of Artificial Sequence: Synthetic polypeptide
QVQLQESGPGLVKPSQTLSLTCTVSGYSISSDFAWNWIRQPPGKGLEWMGYISYSGNTRYQPSLKSRITISRDTSKNQFFLKLNSVTAADTATYYCVTAGRGFPYWGQGTLVTVSSASTKGPSVFPLAPSSKSTSGGTAALGCLVKDYFPEPVTVSWNSGALTSGVHTFPAVLQSSGLYSLSSVVTVPSSSLGTQTYICNVNHKPSNTKVDKKVEPKSCDKTHTCPPCPAPELLGGPSVFLFPPKPKDTLMISRTPEVTCVVVDVSHEDPEVKFNWYVDGVEVHNAKTKPREEQYNSTYRVVSVLTVLHQDWLNGKEYKCKVSNKALPAPIEKTISKAKGQPREPQVYTLPPSRDELTKNQVSLTCLVKGFYPSDIAVEWESNGQPENNYKTTPPVLDSDGSFFLYSKLTVDKSRWQQGNVFSCSVMHEALHNHYTQKSLSLSPGKGGGGSGGGGSGGGGSSEVEYRAEVGQNAYLPCFYTPAAPGNLVPVCWGKGACPVFECGNVVLRTDERDVNYWTSRYWLNGDFRKGDVSLTIENVTLADSGIYCCRIQIPGIMNDEKFNLKLVIKPAKVTPAPTRQRDFTAAFPRMLTTRGHGPAETQTLGSLPDINLTQISTLANELRDSRLANDLRDSGATIRIG

SEQ ID NO: 243 - protein, 666 aa, Artificial Sequence
  Description of Artificial Sequence: Synthetic polypeptide
QVQLQESGPGLVKPSQTLSLTCTVSGYSISSDFAWNWIRQPPGKGLEWMGYISYSGNTRYQPSLKSRITISRDTSKNQFFLKLNSVTAADTATYYCVTAGRGFPYWGQGTLVTVSSASTKGPSVFPLAPSSKSTSGGTAALGCLVKDYFPEPVTVSWNSGALTSGVHTFPAVLQSSGLYSLSSVVTVPSSSLGTQTYICNVNHKPSNTKVDKKVEPKSCDKTHTCPPCPAPELLGGPSVFLFPPKPKDTLMISRTPEVTCVVVDVSHEDPEVKFNWYVDGVEVHNAKTKPREEQYNSTYRVVSVLTVLHQDWLNGKEYKCKVSNKALPAPIEKTISKAKGQPREPQVYTLPPSRDELTKNQVSLTCLVKGFYPSDIAVEWESNGQPENNYKTTPPVLDSDGSFFLYSKLTVDKSRWQQGNVFSCSVMHEALHNHYTQKSLSLSPGKGGGGSGGGGSGGGGSSDTGRPFVEMYSEIPEIIHMTEGRELVIPCRVTSPNITVTLKKFPLDTLIPDGKRIIWDSRKGFIISNATYKEIGLLTCEATVNGHLYKTNYLTHRQTNTIIDVVLSPSHGIELSVGEKLVLNCTARTELNVGIDFNWEYPSSKHQHKKLVNRDLKTQSGSEMKKFLSTLTIDGVTRSDQGLYTCAASSGLMTKKNSTFVRVHEK

SEQ ID NO: 244 - protein, 585 aa, Artificial Sequence
  Description of Artificial Sequence: Synthetic polypeptide
EVQLVESGGGLVQPGGSLRLSCAASGFNIKDTYIHWVRQAPGKGLEWVARIYPTNGYTRYADSVKGRFTISADTSKNTAYLQMNSLRAEDTAVYYCSRWGGDGFYAMDYWGQGTLVTVSSASTKGPSVFPLAPSSKSTSGGTAALGCLVKDYFPEPVTVSWNSGALTSGVHTFPAVLQSSGLYSLSSVVTVPSSSLGTQTYICNVNHKPSNTKVDKKVEPKSCDKTHTCPPCPAPELLGGPSVFLFPPKPKDTLMISRTPEVTCVVVDVSHEDPEVKFNWYVDGVEVHNAKTKPREEQYNSTYRVVSVLTVLHQDWLNGKEYKCKVSNKALPAPIEKTISKAKGQPREPQVYTLPPSREEMTKNQVSLTCLVKGFYPSDIAVEWESNGQPENNYKTTPPVLDSDGSFFLYSKLTVDKSRWQQGNVFSCSVMHEALHNHYTQKSLSLSPGKGGGGSGGGGSGGGGSKESCDVQLYIKRQSEHSILAGDPFELECPVKYCANRPHVTWCKLNGTTCVKLEDRQTSWKEEKNISFFILHFEPVLPNDNGSYRCSANFQSNLIESHSTTLYVTDVKSASERPSKDEMAS

SEQ ID NO: 245 - protein, 379 aa, Artificial Sequence
  Description of Artificial Sequence: Synthetic polypeptide
DIQMTQSPSSLSASVGDRVTITCRASQDVNTAVAWYQQKPGKAPKLLIYSASFLYSGVPSRFSGSRSGTDFTLTISSLQPEDFATYYCQQHYTTPPTFGQGTKVEIKRTVAAPSVFIFPPSDEQLKSGTASVVCLLNNFYPREAKVQWKVDNALQSGNSQESVTEQDSKDSTYSLSSTLTLSKADYEKHKVYACEVTHQGLSSPVTKSFNRGECGGGGSGGGGSGGGGSPGWFLDSPDRPWNPPTFSPALLVVTEGDNATFTCSFSNTSESFVLNWYRMSPSNQTDKLAAFPEDRSQPGQDCRFRVTQLPNGRDFHMSVVRARRNDSGTYLCGAISLAPKAQIKESLRAELRVTERRAEVPTAHPSPSPRPAGQFQTLV

SEQ ID NO: 246 - protein, 759 aa, Artificial Sequence
  Description of Artificial Sequence: Synthetic polypeptide
DIQMTQSPSSLSASVGDRVTITCRASQDVNTAVAWYQQKPGKAPKLLIYSASFLYSGVPSRFSGSRSGTDFTLTISSLQPEDFATYYCQQHYTTPPTFGQGTKVEIKRTVAAPSVFIFPPSDEQLKSGTASVVCLLNNFYPREAKVQWKVDNALQSGNSQESVTEQDSKDSTYSLSSTLTLSKADYEKHKVYACEVTHQGLSSPVTKSFNRGECGGGGSGGGGSGGGGSMDGRFWIRVQESVMVPEGLCISVPCSFSYPRQDWTGSTPAYGYWFKAVTETTKGAPVATNHQSREVEMSTRGRFQLTGDPAKGNCSLVIRDAQMQDESQYFFRVERGSYVRYNFMNDGFFLKVTALTQKPDVYIPETLEPGQPVTVICVFNWAFEECPPPSFSWTGAALSSQGTKPTTSHFSVLSFTPRPQDHNTDLTCHVDFSRKGVSAQRTVRLRVAYAPRDLVISISRDNTPALEPQPQGNVPYLEAQKGQFLRLLCAADSQPPATLSWVLQNRVLSSSHPWGPRPLGLELPGVKAGDSGRYTCRAENRLGSQQRALDLSVQYPPENLRVMVSQANRTVLENLGNGTSLPVLEGQSLCLVCVTHSSPPARLSWTQRGQVLSPSQPSDPGVLELPRVQVEHEGEFTCHARHPLGSQHVSLSLSVHYSPKLLGPSCSWEAEGLHCSCSSQASPAPSLRWWLGEELLEGNSSQDSFEVTPSSAGPWANSSLSLHGGLSSGLRLRCEAWNVHGAQSGSILQLPDKKGLIST

SEQ ID NO: 247 - protein, 348 aa, Artificial Sequence
  Description of Artificial Sequence: Synthetic polypeptide
DIQMTQSPSSLSASVGDRVTITCRASQDVNTAVAWYQQKPGKAPKLLIYSASFLYSGVPSRFSGSRSGTDFTLTISSLQPEDFATYYCQQHYTTPPTFGQGTKVEIKRTVAAPSVFIFPPSDEQLKSGTASVVCLLNNFYPREAKVQWKVDNALQSGNSQESVTEQDSKDSTYSLSSTLTLSKADYEKHKVYACEVTHQGLSSPVTKSFNRGECGGGGSGGGGSGGGGSEEELQVIQPDKSVLVAAGETATLRCTATSLIPVGPIQWFRGAGPGRELIYNQKEGHFPRVTTVSDLTKRNNMDFSIRIGNITPADAGTYYCVKFRKGSPDDVEFKSGAGTELSVRAKPS

SEQ ID NO: 248 - protein, 410 aa, Artificial Sequence
  Description of Artificial Sequence: Synthetic polypeptide
DIQMTQSPSSLSASVGDRVTITCRASQDVNTAVAWYQQKPGKAPKLLIYSASFLYSGVPSRFSGSRSGTDFTLTISSLQPEDFATYYCQQHYTTPPTFGQGTKVEIKRTVAAPSVFIFPPSDEQLKSGTASVVCLLNNFYPREAKVQWKVDNALQSGNSQESVTEQDSKDSTYSLSSTLTLSKADYEKHKVYACEVTHQGLSSPVTKSFNRGECGGGGSGGGGSGGGGSSEVEYRAEVGQNAYLPCFYTPAAPGNLVPVCWGKGACPVFECGNVVLRTDERDVNYWTSRYWLNGDFRKGDVSLTIENVTLADSGIYCCRIQIPGIMNDEKFNLKLVIKPAKVTPAPTRQRDFTAAFPRMLTTRGHGPAETQTLGSLPDINLTQISTLANELRDSRLANDLRDSGATIRIG

SEQ ID NO: 249 - protein, 615 aa, Artificial Sequence
  Description of Artificial Sequence: Synthetic polypeptide
EVQLVESGGGLVQPGGSLRLSCAASGFNIKDTYIHWVRQAPGKGLEWVARIYPTNGYTRYADSVKGRFTISADTSKNTAYLQMNSLRAEDTAVYYCSRWGGDGFYAMDYWGQGTLVTVSSASTKGPSVFPLAPSSKSTSGGTAALGCLVKDYFPEPVTVSWNSGALTSGVHTFPAVLQSSGLYSLSSVVTVPSSSLGTQTYICNVNHKPSNTKVDKKVEPKSCDKTHTCPPCPAPELLGGPSVFLFPPKPKDTLMISRTPEVTCVVVDVSHEDPEVKFNWYVDGVEVHNAKTKPREEQYNSTYRVVSVLTVLHQDWLNGKEYKCKVSNKALPAPIEKTISKAKGQPREPQVYTLPPSREEMTKNQVSLTCLVKGFYPSDIAVEWESNGQPENNYKTTPPVLDSDGSFFLYSKLTVDKSRWQQGNVFSCSVMHEALHNHYTQKSLSLSPGKGGGGSGGGGSGGGGSPGWFLDSPDRPWNPPTFSPALLVVTEGDNATFTCSFSNTSESFVLNWYRMSPSNQTDKLAAFPEDRSQPGQDCRFRVTQLPNGRDFHMSVVRARRNDSGTYLCGAISLAPKAQIKESLRAELRVTERRAEVPTAHPSPSPRPAGQFQTLV

SEQ ID NO: 250 - protein, 349 aa, Artificial Sequence
  Description of Artificial Sequence: Synthetic polypeptide
DIQMTQSPSSLSASVGDRVTITCRASQDVNTAVAWYQQKPGKAPKLLIYSASFLYSGVPSRFSGSRSGTDFTLTISSLQPEDFATYYCQQHYTTPPTFGQGTKVEIKRTVAAPSVFIFPPSDEQLKSGTASVVCLLNNFYPREAKVQWKVDNALQSGNSQESVTEQDSKDSTYSLSSTLTLSKADYEKHKVYACEVTHQGLSSPVTKSFNRGECGGGGSGGGGSGGGGSKESCDVQLYIKRQSEHSILAGDPFELECPVKYCANRPHVTWCKLNGTTCVKLEDRQTSWKEEKNISFFILHFEPVLPNDNGSYRCSANFQSNLIESHSTTLYVTDVKSASERPSKDEMAS

SEQ ID NO: 251 - protein, 995 aa, Artificial Sequence
  Description of Artificial Sequence: Synthetic polypeptide
EVQLVESGGGLVQPGGSLRLSCAASGFNIKDTYIHWVRQAPGKGLEWVARIYPTNGYTRYADSVKGRFTISADTSKNTAYLQMNSLRAEDTAVYYCSRWGGDGFYAMDYWGQGTLVTVSSASTKGPSVFPLAPSSKSTSGGTAALGCLVKDYFPEPVTVSWNSGALTSGVHTFPAVLQSSGLYSLSSVVTVPSSSLGTQTYICNVNHKPSNTKVDKKVEPKSCDKTHTCPPCPAPELLGGPSVFLFPPKPKDTLMISRTPEVTCVVVDVSHEDPEVKFNWYVDGVEVHNAKTKPREEQYNSTYRVVSVLTVLHQDWLNGKEYKCKVSNKALPAPIEKTISKAKGQPREPQVYTLPPSREEMTKNQVSLTCLVKGFYPSDIAVEWESNGQPENNYKTTPPVLDSDGSFFLYSKLTVDKSRWQQGNVFSCSVMHEALHNHYTQKSLSLSPGKGGGGSGGGGSGGGGSMDGRFWIRVQESVMVPEGLCISVPCSFSYPRQDWTGSTPAYGYWFKAVTETTKGAPVATNHQSREVEMSTRGRFQLTGDPAKGNCSLVIRDAQMQDESQYFFRVERGSYVRYNFMNDGFFLKVTALTQKPDVYIPETLEPGQPVTVICVFNWAFEECPPPSFSWTGAALSSQGTKPTTSHFSVLSFTPRPQDHNTDLTCHVDFSRKGVSAQRTVRLRVAYAPRDLVISISRDNTPALEPQPQGNVPYLEAQKGQFLRLLCAADSQPPATLSWVLQNRVLSSSHPWGPRPLGLELPGVKAGDSGRYTCRAENRLGSQQRALDLSVQYPPENLRVMVSQANRTVLENLGNGTSLPVLEGQSLCLVCVTHSSPPARLSWTQRGQVLSPSQPSDPGVLELPRVQVEHEGEFTCHARHPLGSQHVSLSLSVHYSPKLLGPSCSWEAEGLHCSCSSQASPAPSLRWWLGEELLEGNSSQDSFEVTPSSAGPWANSSLSLHGGLSSGLRLRCEAWNVHGAQSGSILQLPDKKGLIST

SEQ ID NO: 252 - protein, 584 aa, Artificial Sequence
  Description of Artificial Sequence: Synthetic polypeptide
EVQLVESGGGLVQPGGSLRLSCAASGFNIKDTYIHWVRQAPGKGLEWVARIYPTNGYTRYADSVKGRFTISADTSKNTAYLQMNSLRAEDTAVYYCSRWGGDGFYAMDYWGQGTLVTVSSASTKGPSVFPLAPSSKSTSGGTAALGCLVKDYFPEPVTVSWNSGALTSGVHTFPAVLQSSGLYSLSSVVTVPSSSLGTQTYICNVNHKPSNTKVDKKVEPKSCDKTHTCPPCPAPELLGGPSVFLFPPKPKDTLMISRTPEVTCVVVDVSHEDPEVKFNWYVDGVEVHNAKTKPREEQYNSTYRVVSVLTVLHQDWLNGKEYKCKVSNKALPAPIEKTISKAKGQPREPQVYTLPPSREEMTKNQVSLTCLVKGFYPSDIAVEWESNGQPENNYKTTPPVLDSDGSFFLYSKLTVDKSRWQQGNVFSCSVMHEALHNHYTQKSLSLSPGKGGGGSGGGGSGGGGSEEELQVIQPDKSVLVAAGETATLRCTATSLIPVGPIQWFRGAGPGRELIYNQKEGHFPRVTTVSDLTKRNNMDFSIRIGNITPADAGTYYCVKFRKGSPDDVEFKSGAGTELSVRAKPS

SEQ ID NO: 253 - protein, 602 aa, Artificial Sequence
  Description of Artificial Sequence: Synthetic polypeptide
EVQLVESGGGLVQPGGSLRLSCAASGFNIKDTYIHWVRQAPGKGLEWVARIYPTNGYTRYADSVKGRFTISADTSKNTAYLQMNSLRAEDTAVYYCSRWGGDGFYAMDYWGQGTLVTVSSASTKGPSVFPLAPSSKSTSGGTAALGCLVKDYFPEPVTVSWNSGALTSGVHTFPAVLQSSGLYSLSSVVTVPSSSLGTQTYICNVNHKPSNTKVDKKVEPKSCDKTHTCPPCPAPELLGGPSVFLFPPKPKDTLMISRTPEVTCVVVDVSHEDPEVKFNWYVDGVEVHNAKTKPREEQYNSTYRVVSVLTVLHQDWLNGKEYKCKVSNKALPAPIEKTISKAKGQPREPQVYTLPPSREEMTKNQVSLTCLVKGFYPSDIAVEWESNGQPENNYKTTPPVLDSDGSFFLYSKLTVDKSRWQQGNVFSCSVMHEALHNHYTQKSLSLSPGKGGGGSGGGGSGGGGSTIPPHVQKSVNNDMIVTDNNGAVKFPQLCKFCDVRFSTCDNQKSCMSNCSITSICEKPQEVCVAVWRKNDENITLETVCHDPKLPYHDFILEDAASPKCIMKEKKKPGETFFMCSCSSDECNDNIIFSEEYNTSNPD

SEQ ID NO: 254 - protein, 646 aa, Artificial Sequence
  Description of Artificial Sequence: Synthetic polypeptide
EVQLVESGGGLVQPGGSLRLSCAASGFNIKDTYIHWVRQAPGKGLEWVARIYPTNGYTRYADSVKGRFTISADTSKNTAYLQMNSLRAEDTAVYYCSRWGGDGFYAMDYWGQGTLVTVSSASTKGPSVFPLAPSSKSTSGGTAALGCLVKDYFPEPVTVSWNSGALTSGVHTFPAVLQSSGLYSLSSVVTVPSSSLGTQTYICNVNHKPSNTKVDKKVEPKSCDKTHTCPPCPAPELLGGPSVFLFPPKPKDTLMISRTPEVTCVVVDVSHEDPEVKFNWYVDGVEVHNAKTKPREEQYNSTYRVVSVLTVLHQDWLNGKEYKCKVSNKALPAPIEKTISKAKGQPREPQVYTLPPSREEMTKNQVSLTCLVKGFYPSDIAVEWESNGQPENNYKTTPPVLDSDGSFFLYSKLTVDKSRWQQGNVFSCSVMHEALHNHYTQKSLSLSPGKGGGGSGGGGSGGGGSSEVEYRAEVGQNAYLPCFYTPAAPGNLVPVCWGKGACPVFECGNVVLRTDERDVNYWTSRYWLNGDFRKGDVSLTIENVTLADSGIYCCRIQIPGIMNDEKFNLKLVIKPAKVTPAPTRQRDFTAAFPRMLTTRGHGPAETQTLGSLPDINLTQISTLANELRDSRLANDLRDSGATIRIG

SEQ ID NO: 255 - protein, 670 aa, Artificial Sequence
  Description of Artificial Sequence: Synthetic polypeptide
EVQLVESGGGLVQPGGSLRLSCAASGFNIKDTYIHWVRQAPGKGLEWVARIYPTNGYTRYADSVKGRFTISADTSKNTAYLQMNSLRAEDTAVYYCSRWGGDGFYAMDYWGQGTLVTVSSASTKGPSVFPLAPSSKSTSGGTAALGCLVKDYFPEPVTVSWNSGALTSGVHTFPAVLQSSGLYSLSSVVTVPSSSLGTQTYICNVNHKPSNTKVDKKVEPKSCDKTHTCPPCPAPELLGGPSVFLFPPKPKDTLMISRTPEVTCVVVDVSHEDPEVKFNWYVDGVEVHNAKTKPREEQYNSTYRVVSVLTVLHQDWLNGKEYKCKVSNKALPAPIEKTISKAKGQPREPQVYTLPPSREEMTKNQVSLTCLVKGFYPSDIAVEWESNGQPENNYKTTPPVLDSDGSFFLYSKLTVDKSRWQQGNVFSCSVMHEALHNHYTQKSLSLSPGKGGGGSGGGGSGGGGSSDTGRPFVEMYSEIPEIIHMTEGRELVIPCRVTSPNITVTLKKFPLDTLIPDGKRIIWDSRKGFIISNATYKEIGLLTCEATVNGHLYKTNYLTHRQTNTIIDVVLSPSHGIELSVGEKLVLNCTARTELNVGIDFNWEYPSSKHQHKKLVNRDLKTQSGSEMKKFLSTLTIDGVTRSDQGLYTCAASSGLMTKKNSTFVRVHEK

SEQ ID NO: 256 - protein, 582 aa, Artificial Sequence
  Description of Artificial Sequence: Synthetic polypeptide
EVQLVESGGGLVQPGGSLRLSCAASGFTFSSYNMNWVRQAPGKGLEWVSYISSSSSTIYYADSVKGRFTISRDNAKNSLSLQMNSLRDEDTAVYYCARAYYYGMDVWGQGTTVTVSSASTKGPSVFPLAPSSKSTSGGTAALGCLVKDYFPEPVTVSWNSGALTSGVHTFPAVLQSSGLYSLSSVVTVPSSSLGTQTYICNVNHKPSNTKVDKRVEPKSCDKTHTCPPCPAPELLGGPSVFLFPPKPKDTLMISRTPEVTCVVVDVSHEDPEVKFNWYVDGVEVHNAKTKPREEQYNSTYRVVSVLTVLHQDWLNGKEYKCKVSNKALPAPIEKTISKAKGQPREPQVYTLPPSREEMTKNQVSLTCLVKGFYPSDIAVEWESNGQPENNYKTTPPVLDSDGSFFLYSKLTVDKSRWQQGNVFSCSVMHEALHNHYTQKSLSLSPGKGGGGSGGGGSGGGGSKESCDVQLYIKRQSEHSILAGDPFELECPVKYCANRPHVTWCKLNGTTCVKLEDRQTSWKEEKNISFFILHFEPVLPNDNGSYRCSANFQSNLIESHSTTLYVTDVKSASERPSKDEMAS

SEQ ID NO: 257 - protein, 379 aa, Artificial Sequence
  Description of Artificial Sequence: Synthetic polypeptide
DIQMTQSPSSVSASVGDRVTITCRASQGISGWLAWYQQKPGKAPKFLIYAASTLQSGVPSRFSGSGSGTDFTLTISSLQPEDFATYYCQQANSFPPTFGGGTKVEIKRTVAAPSVFIFPPSDEQLKSGTASVVCLLNNFYPREAKVQWKVDNALQSGNSQESVTEQDSKDSTYSLSSTLTLSKADYEKHKVYACEVTHQGLSSPVTKSFNRGECGGGGSGGGGSGGGGSPGWFLDSPDRPWNPPTFSPALLVVTEGDNATFTCSFSNTSESFVLNWYRMSPSNQTDKLAAFPEDRSQPGQDCRFRVTQLPNGRDFHMSVVRARRNDSGTYLCGAISLAPKAQIKESLRAELRVTERRAEVPTAHPSPSPRPAGQFQTLV

SEQ ID NO: 258 - protein, 759 aa, Artificial Sequence
  Description of Artificial Sequence: Synthetic polypeptide
DIQMTQSPSSVSASVGDRVTITCRASQGISGWLAWYQQKPGKAPKFLIYAASTLQSGVPSRFSGSGSGTDFTLTISSLQPEDFATYYCQQANSFPPTFGGGTKVEIKRTVAAPSVFIFPPSDEQLKSGTASVVCLLNNFYPREAKVQWKVDNALQSGNSQESVTEQDSKDSTYSLSSTLTLSKADYEKHKVYACEVTHQGLSSPVTKSFNRGECGGGGSGGGGSGGGGSMDGRFWIRVQESVMVPEGLCISVPCSFSYPRQDWTGSTPAYGYWFKAVTETTKGAPVATNHQSREVEMSTRGRFQLTGDPAKGNCSLVIRDAQMQDESQYFFRVERGSYVRYNFMNDGFFLKVTALTQKPDVYIPETLEPGQPVTVICVFNWAFEECPPPSFSWTGAALSSQGTKPTTSHFSVLSFTPRPQDHNTDLTCHVDFSRKGVSAQRTVRLRVAYAPRDLVISISRDNTPALEPQPQGNVPYLEAQKGQFLRLLCAADSQPPATLSWVLQNRVLSSSHPWGPRPLGLELPGVKAGDSGRYTCRAENRLGSQQRALDLSVQYPPENLRVMVSQANRTVLENLGNGTSLPVLEGQSLCLVCVTHSSPPARLSWTQRGQVLSPSQPSDPGVLELPRVQVEHEGEFTCHARHPLGSQHVSLSLSVHYSPKLLGPSCSWEAEGLHCSCSSQASPAPSLRWWLGEELLEGNSSQDSFEVTPSSAGPWANSSLSLHGGLSSGLRLRCEAWNVHGAQSGSILQLPDKKGLIST

SEQ ID NO: 259 - protein, 348 aa, Artificial Sequence
  Description of Artificial Sequence: Synthetic polypeptide
DIQMTQSPSSVSASVGDRVTITCRASQGISGWLAWYQQKPGKAPKFLIYAASTLQSGVPSRFSGSGSGTDFTLTISSLQPEDFATYYCQQANSFPPTFGGGTKVEIKRTVAAPSVFIFPPSDEQLKSGTASVVCLLNNFYPREAKVQWKVDNALQSGNSQESVTEQDSKDSTYSLSSTLTLSKADYEKHKVYACEVTHQGLSSPVTKSFNRGECGGGGSGGGGSGGGGSEEELQVIQPDKSVLVAAGETATLRCTATSLIPVGPIQWFRGAGPGRELIYNQKEGHFPRVTTVSDLTKRNNMDFSIRIGNITPADAGTYYCVKFRKGSPDDVEFKSGAGTELSVRAKPS

SEQ ID NO: 260 - protein, 410 aa, Artificial Sequence
  Description of Artificial Sequence: Synthetic polypeptide
DIQMTQSPSSVSASVGDRVTITCRASQGISGWLAWYQQKPGKAPKFLIYAASTLQSGVPSRFSGSGSGTDFTLTISSLQPEDFATYYCQQANSFPPTFGGGTKVEIKRTVAAPSVFIFPPSDEQLKSGTASVVCLLNNFYPREAKVQWKVDNALQSGNSQESVTEQDSKDSTYSLSSTLTLSKADYEKHKVYACEVTHQGLSSPVTKSFNRGECGGGGSGGGGSGGGGSSEVEYRAEVGQNAYLPCFYTPAAPGNLVPVCWGKGACPVFECGNVVLRTDERDVNYWTSRYWLNGDFRKGDVSLTIENVTLADSGIYCCRIQIPGIMNDEKFNLKLVIKPAKVTPAPTRQRDFTAAFPRMLTTRGHGPAETQTLGSLPDINLTQISTLANELRDSRLANDLRDSGATIRIG

SEQ ID NO: 261 - protein, 612 aa, Artificial Sequence
  Description of Artificial Sequence: Synthetic polypeptide
EVQLVESGGGLVQPGGSLRLSCAASGFTFSSYNMNWVRQAPGKGLEWVSYISSSSSTIYYADSVKGRFTISRDNAKNSLSLQMNSLRDEDTAVYYCARAYYYGMDVWGQGTTVTVSSASTKGPSVFPLAPSSKSTSGGTAALGCLVKDYFPEPVTVSWNSGALTSGVHTFPAVLQSSGLYSLSSVVTVPSSSLGTQTYICNVNHKPSNTKVDKRVEPKSCDKTHTCPPCPAPELLGGPSVFLFPPKPKDTLMISRTPEVTCVVVDVSHEDPEVKFNWYVDGVEVHNAKTKPREEQYNSTYRVVSVLTVLHQDWLNGKEYKCKVSNKALPAPIEKTISKAKGQPREPQVYTLPPSREEMTKNQVSLTCLVKGFYPSDIAVEWESNGQPENNYKTTPPVLDSDGSFFLYSKLTVDKSRWQQGNVFSCSVMHEALHNHYTQKSLSLSPGKGGGGSGGGGSGGGGSPGWFLDSPDRPWNPPTFSPALLVVTEGDNATFTCSFSNTSESFVLNWYRMSPSNQTDKLAAFPEDRSQPGQDCRFRVTQLPNGRDFHMSVVRARRNDSGTYLCGAISLAPKAQIKESLRAELRVTERRAEVPTAHPSPSPRPAGQFQTLV

SEQ ID NO: 262 - protein, 349 aa, Artificial Sequence
  Description of Artificial Sequence: Synthetic polypeptide
DIQMTQSPSSVSASVGDRVTITCRASQGISGWLAWYQQKPGKAPKFLIYAASTLQSGVPSRFSGSGSGTDFTLTISSLQPEDFATYYCQQANSFPPTFGGGTKVEIKRTVAAPSVFIFPPSDEQLKSGTASVVCLLNNFYPREAKVQWKVDNALQSGNSQESVTEQDSKDSTYSLSSTLTLSKADYEKHKVYACEVTHQGLSSPVTKSFNRGECGGGGSGGGGSGGGGSKESCDVQLYIKRQSEHSILAGDPFELECPVKYCANRPHVTWCKLNGTTCVKLEDRQTSWKEEKNISFFILHFEPVLPNDNGSYRCSANFQSNLIESHSTTLYVTDVKSASERPSKDEMAS

SEQ ID NO: 263 - protein, 992 aa, Artificial Sequence
  Description of Artificial Sequence: Synthetic polypeptide
EVQLVESGGGLVQPGGSLRLSCAASGFTFSSYNMNWVRQAPGKGLEWVSYISSSSSTIYYADSVKGRFTISRDNAKNSLSLQMNSLRDEDTAVYYCARAYYYGMDVWGQGTTVTVSSASTKGPSVFPLAPSSKSTSGGTAALGCLVKDYFPEPVTVSWNSGALTSGVHTFPAVLQSSGLYSLSSVVTVPSSSLGTQTYICNVNHKPSNTKVDKRVEPKSCDKTHTCPPCPAPELLGGPSVFLFPPKPKDTLMISRTPEVTCVVVDVSHEDPEVKFNWYVDGVEVHNAKTKPREEQYNSTYRVVSVLTVLHQDWLNGKEYKCKVSNKALPAPIEKTISKAKGQPREPQVYTLPPSREEMTKNQVSLTCLVKGFYPSDIAVEWESNGQPENNYKTTPPVLDSDGSFFLYSKLTVDKSRWQQGNVFSCSVMHEALHNHYTQKSLSLSPGKGGGGSGGGGSGGGGSMDGRFWIRVQESVMVPEGLCISVPCSFSYPRQDWTGSTPAYGYWFKAVTETTKGAPVATNHQSREVEMSTRGRFQLTGDPAKGNCSLVIRDAQMQDESQYFFRVERGSYVRYNFMNDGFFLKVTALTQKPDVYIPETLEPGQPVTVICVFNWAFEECPPPSFSWTGAALSSQGTKPTTSHFSVLSFTPRPQDHNTDLTCHVDFSRKGVSAQRTVRLRVAYAPRDLVISISRDNTPALEPQPQGNVPYLEAQKGQFLRLLCAADSQPPATLSWVLQNRVLSSSHPWGPRPLGLELPGVKAGDSGRYTCRAENRLGSQQRALDLSVQYPPENLRVMVSQANRTVLENLGNGTSLPVLEGQSLCLVCVTHSSPPARLSWTQRGQVLSPSQPSDPGVLELPRVQVEHEGEFTCHARHPLGSQHVSLSLSVHYSPKLLGPSCSWEAEGLHCSCSSQASPAPSLRWWLGEELLEGNSSQDSFEVTPSSAGPWANSSLSLHGGLSSGLRLRCEAWNVHGAQSGSILQLPDKKGLIST

SEQ ID NO: 264 - protein, 581 aa, Artificial Sequence
  Description of Artificial Sequence: Synthetic polypeptide
EVQLVESGGGLVQPGGSLRLSCAASGFTFSSYNMNWVRQAPGKGLEWVSYISSSSSTIYYADSVKGRFTISRDNAKNSLSLQMNSLRDEDTAVYYCARAYYYGMDVWGQGTTVTVSSASTKGPSVFPLAPSSKSTSGGTAALGCLVKDYFPEPVTVSWNSGALTSGVHTFPAVLQSSGLYSLSSVVTVPSSSLGTQTYICNVNHKPSNTKVDKRVEPKSCDKTHTCPPCPAPELLGGPSVFLFPPKPKDTLMISRTPEVTCVVVDVSHEDPEVKFNWYVDGVEVHNAKTKPREEQYNSTYRVVSVLTVLHQDWLNGKEYKCKVSNKALPAPIEKTISKAKGQPREPQVYTLPPSREEMTKNQVSLTCLVKGFYPSDIAVEWESNGQPENNYKTTPPVLDSDGSFFLYSKLTVDKSRWQQGNVFSCSVMHEALHNHYTQKSLSLSPGKGGGGSGGGGSGGGGSEEELQVIQPDKSVLVAAGETATLRCTATSLIPVGPIQWFRGAGPGRELIYNQKEGHFPRVTTVSDLTKRNNMDFSIRIGNITPADAGTYYCVKFRKGSPDDVEFKSGAGTELSVRAKPS

SEQ ID NO: 265 - protein, 599 aa, Artificial Sequence
  Description of Artificial Sequence: Synthetic polypeptide
EVQLVESGGGLVQPGGSLRLSCAASGFTFSSYNMNWVRQAPGKGLEWVSYISSSSSTIYYADSVKGRFTISRDNAKNSLSLQMNSLRDEDTAVYYCARAYYYGMDVWGQGTTVTVSSASTKGPSVFPLAPSSKSTSGGTAALGCLVKDYFPEPVTVSWNSGALTSGVHTFPAVLQSSGLYSLSSVVTVPSSSLGTQTYICNVNHKPSNTKVDKRVEPKSCDKTHTCPPCPAPELLGGPSVFLFPPKPKDTLMISRTPEVTCVVVDVSHEDPEVKFNWYVDGVEVHNAKTKPREEQYNSTYRVVSVLTVLHQDWLNGKEYKCKVSNKALPAPIEKTISKAKGQPREPQVYTLPPSREEMTKNQVSLTCLVKGFYPSDIAVEWESNGQPENNYKTTPPVLDSDGSFFLYSKLTVDKSRWQQGNVFSCSVMHEALHNHYTQKSLSLSPGKGGGGSGGGGSGGGGSTIPPHVQKSVNNDMIVTDNNGAVKFPQLCKFCDVRFSTCDNQKSCMSNCSITSICEKPQEVCVAVWRKNDENITLETVCHDPKLPYHDFILEDAASPKCIMKEKKKPGETFFMCSCSSDECNDNIIFSEEYNTSNPD

SEQ ID NO: 266 - protein, 643 aa, Artificial Sequence
  Description of Artificial Sequence: Synthetic polypeptide
EVQLVESGGGLVQPGGSLRLSCAASGFTFSSYNMNWVRQAPGKGLEWVSYISSSSSTIYYADSVKGRFTISRDNAKNSLSLQMNSLRDEDTAVYYCARAYYYGMDVWGQGTTVTVSSASTKGPSVFPLAPSSKSTSGGTAALGCLVKDYFPEPVTVSWNSGALTSGVHTFPAVLQSSGLYSLSSVVTVPSSSLGTQTYICNVNHKPSNTKVDKRVEPKSCDKTHTCPPCPAPELLGGPSVFLFPPKPKDTLMISRTPEVTCVVVDVSHEDPEVKFNWYVDGVEVHNAKTKPREEQYNSTYRVVSVLTVLHQDWLNGKEYKCKVSNKALPAPIEKTISKAKGQPREPQVYTLPPSREEMTKNQVSLTCLVKGFYPSDIAVEWESNGQPENNYKTTPPVLDSDGSFFLYSKLTVDKSRWQQGNVFSCSVMHEALHNHYTQKSLSLSPGKGGGGSGGGGSGGGGSSEVEYRAEVGQNAYLPCFYTPAAPGNLVPVCWGKGACPVFECGNVVLRTDERDVNYWTSRYWLNGDFRKGDVSLTIENVTLADSGIYCCRIQIPGIMNDEKFNLKLVIKPAKVTPAPTRQRDFTAAFPRMLTTRGHGPAETQTLGSLPDINLTQISTLANELRDSRLANDLRDSGATIRIG

SEQ ID NO: 267 - protein, 667 aa, Artificial Sequence
  Description of Artificial Sequence: Synthetic polypeptide
EVQLVESGGGLVQPGGSLRLSCAASGFTFSSYNMNWVRQAPGKGLEWVSYISSSSSTIYYADSVKGRFTISRDNAKNSLSLQMNSLRDEDTAVYYCARAYYYGMDVWGQGTTVTVSSASTKGPSVFPLAPSSKSTSGGTAALGCLVKDYFPEPVTVSWNSGALTSGVHTFPAVLQSSGLYSLSSVVTVPSSSLGTQTYICNVNHKPSNTKVDKRVEPKSCDKTHTCPPCPAPELLGGPSVFLFPPKPKDTLMISRTPEVTCVVVDVSHEDPEVKFNWYVDGVEVHNAKTKPREEQYNSTYRVVSVLTVLHQDWLNGKEYKCKVSNKALPAPIEKTISKAKGQPREPQVYTLPPSREEMTKNQVSLTCLVKGFYPSDIAVEWESNGQPENNYKTTPPVLDSDGSFFLYSKLTVDKSRWQQGNVFSCSVMHEALHNHYTQKSLSLSPGKGGGGSGGGGSGGGGSSDTGRPFVEMYSEIPEIIHMTEGRELVIPCRVTSPNITVTLKKFPLDTLIPDGKRIIWDSRKGFIISNATYKEIGLLTCEATVNGHLYKTNYLTHRQTNTIIDVVLSPSHGIELSVGEKLVLNCTARTELNVGIDFNWEYPSSKHQHKKLVNRDLKTQSGSEMKKFLSTLTIDGVTRSDQGLYTCAASSGLMTKKNSTFVRVHEK

SEQ ID NO: 268 - protein, 582 aa, Artificial Sequence
  Description of Artificial Sequence: Synthetic polypeptide
QVQLQQWGAGLLKPSETLSLTCAVYGGSFSGYYWSWIRQPPGKGLEWIGEINHSGSTNYNPSLKSRVTISVDTSKNQFSLKLSSVTAADTAVYYCARGRRFGDFDYWGQGTLVTVSSASTKGPSVFPLAPSSKSTSGGTAALGCLVKDYFPEPVTVSWNSGALTSGVHTFPAVLQSSGLYSLSSVVTVPSSSLGTQTYICNVNHKPSNTKVDKKVEPKSCDKTHTCPPCPAPELLGGPSVFLFPPKPKDTLMISRTPEVTCVVVDVSHEDPEVKFNWYVDGVEVHNAKTKPREEQYNSTYRVVSVLTVLHQDWLNGKEYKCKVSNKALPAPIEKTISKAKGQPREPQVYTLPPSREEMTKNQVSLTCLVKGFYPSDIAVEWESNGQPENNYKTTPPVLDSDGSFFLYSKLTVDKSRWQQGNVFSCSVMHEALHNHYTQKSLSLSPGKGGGGSGGGGSGGGGSKESCDVQLYIKRQSEHSILAGDPFELECPVKYCANRPHVTWCKLNGTTCVKLEDRQTSWKEEKNISFFILHFEPVLPNDNGSYRCSANFQSNLIESHSTTLYVTDVKSASERPSKDEMAS

SEQ ID NO: 269 - protein, 612 aa, Artificial Sequence
  Description of Artificial Sequence: Synthetic polypeptide
QVQLQQWGAGLLKPSETLSLTCAVYGGSFSGYYWSWIRQPPGKGLEWIGEINHSGSTNYNPSLKSRVTISVDTSKNQFSLKLSSVTAADTAVYYCARGRRFGDFDYWGQGTLVTVSSASTKGPSVFPLAPSSKSTSGGTAALGCLVKDYFPEPVTVSWNSGALTSGVHTFPAVLQSSGLYSLSSVVTVPSSSLGTQTYICNVNHKPSNTKVDKKVEPKSCDKTHTCPPCPAPELLGGPSVFLFPPKPKDTLMISRTPEVTCVVVDVSHEDPEVKFNWYVDGVEVHNAKTKPREEQYNSTYRVVSVLTVLHQDWLNGKEYKCKVSNKALPAPIEKTISKAKGQPREPQVYTLPPSREEMTKNQVSLTCLVKGFYPSDIAVEWESNGQPENNYKTTPPVLDSDGSFFLYSKLTVDKSRWQQGNVFSCSVMHEALHNHYTQKSLSLSPGKGGGGSGGGGSGGGGSPGWFLDSPDRPWNPPTFSPALLVVTEGDNATFTCSFSNTSESFVLNWYRMSPSNQTDKLAAFPEDRSQPGQDCRFRVTQLPNGRDFHMSVVRARRNDSGTYLCGAISLAPKAQIKESLRAELRVTERRAEVPTAHPSPSPRPAGQFQTLV

SEQ ID NO: 270 - protein, 992 aa, Artificial Sequence
  Description of Artificial Sequence: Synthetic polypeptide
QVQLQQWGAGLLKPSETLSLTCAVYGGSFSGYYWSWIRQPPGKGLEWIGEINHSGSTNYNPSLKSRVTISVDTSKNQFSLKLSSVTAADTAVYYCARGRRFGDFDYWGQGTLVTVSSASTKGPSVFPLAPSSKSTSGGTAALGCLVKDYFPEPVTVSWNSGALTSGVHTFPAVLQSSGLYSLSSVVTVPSSSLGTQTYICNVNHKPSNTKVDKKVEPKSCDKTHTCPPCPAPELLGGPSVFLFPPKPKDTLMISRTPEVTCVVVDVSHEDPEVKFNWYVDGVEVHNAKTKPREEQYNSTYRVVSVLTVLHQDWLNGKEYKCKVSNKALPAPIEKTISKAKGQPREPQVYTLPPSREEMTKNQVSLTCLVKGFYPSDIAVEWESNGQPENNYKTTPPVLDSDGSFFLYSKLTVDKSRWQQGNVFSCSVMHEALHNHYTQKSLSLSPGKGGGGSGGGGSGGGGSMDGRFWIRVQESVMVPEGLCISVPCSFSYPRQDWTGSTPAYGYWFKAVTETTKGAPVATNHQSREVEMSTRGRFQLTGDPAKGNCSLVIRDAQMQDESQYFFRVERGSYVRYNFMNDGFFLKVTALTQKPDVYIPETLEPGQPVTVICVFNWAFEECPPPSFSWTGAALSSQGTKPTTSHFSVLSFTPRPQDHNTDLTCHVDFSRKGVSAQRTVRLRVAYAPRDLVISISRDNTPALEPQPQGNVPYLEAQKGQFLRLLCAADSQPPATLSWVLQNRVLSSSHPWGPRPLGLELPGVKAGDSGRYTCRAENRLGSQQRALDLSVQYPPENLRVMVSQANRTVLENLGNGTSLPVLEGQSLCLVCVTHSSPPARLSWTQRGQVLSPSQPSDPGVLELPRVQVEHEGEFTCHARHPLGSQHVSLSLSVHYSPKLLGPSCSWEAEGLHCSCSSQASPAPSLRWWLGEELLEGNSSQDSFEVTPSSAGPWANSSLSLHGGLSSGLRLRCEAWNVHGAQSGSILQLPDKKGLIST

SEQ ID NO: 271 - protein, 581 aa, Artificial Sequence
  Description of Artificial Sequence: Synthetic polypeptide
QVQLQQWGAGLLKPSETLSLTCAVYGGSFSGYYWSWIRQPPGKGLEWIGEINHSGSTNYNPSLKSRVTISVDTSKNQFSLKLSSVTAADTAVYYCARGRRFGDFDYWGQGTLVTVSSASTKGPSVFPLAPSSKSTSGGTAALGCLVKDYFPEPVTVSWNSGALTSGVHTFPAVLQSSGLYSLSSVVTVPSSSLGTQTYICNVNHKPSNTKVDKKVEPKSCDKTHTCPPCPAPELLGGPSVFLFPPKPKDTLMISRTPEVTCVVVDVSHEDPEVKFNWYVDGVEVHNAKTKPREEQYNSTYRVVSVLTVLHQDWLNGKEYKCKVSNKALPAPIEKTISKAKGQPREPQVYTLPPSREEMTKNQVSLTCLVKGFYPSDIAVEWESNGQPENNYKTTPPVLDSDGSFFLYSKLTVDKSRWQQGNVFSCSVMHEALHNHYTQKSLSLSPGKGGGGSGGGGSGGGGSEEELQVIQPDKSVLVAAGETATLRCTATSLIPVGPIQWFRGAGPGRELIYNQKEGHFPRVTTVSDLTKRNNMDFSIRIGNITPADAGTYYCVKFRKGSPDDVEFKSGAGTELSVRAKPS

SEQ ID NO: 272 - protein, 599 aa, Artificial Sequence
  Description of Artificial Sequence: Synthetic polypeptide
QVQLQQWGAGLLKPSETLSLTCAVYGGSFSGYYWSWIRQPPGKGLEWIGEINHSGSTNYNPSLKSRVTISVDTSKNQFSLKLSSVTAADTAVYYCARGRRFGDFDYWGQGTLVTVSSASTKGPSVFPLAPSSKSTSGGTAALGCLVKDYFPEPVTVSWNSGALTSGVHTFPAVLQSSGLYSLSSVVTVPSSSLGTQTYICNVNHKPSNTKVDKKVEPKSCDKTHTCPPCPAPELLGGPSVFLFPPKPKDTLMISRTPEVTCVVVDVSHEDPEVKFNWYVDGVEVHNAKTKPREEQYNSTYRVVSVLTVLHQDWLNGKEYKCKVSNKALPAPIEKTISKAKGQPREPQVYTLPPSREEMTKNQVSLTCLVKGFYPSDIAVEWESNGQPENNYKTTPPVLDSDGSFFLYSKLTVDKSRWQQGNVFSCSVMHEALHNHYTQKSLSLSPGKGGGGSGGGGSGGGGSTIPPHVQKSVNNDMIVTDNNGAVKFPQLCKFCDVRFSTCDNQKSCMSNCSITSICEKPQEVCVAVWRKNDENITLETVCHDPKLPYHDFILEDAASPKCIMKEKKKPGETFFMCSCSSDECNDNIIFSEEYNTSNPD

SEQ ID NO: 273 - protein, 643 aa, Artificial Sequence
  Description of Artificial Sequence: Synthetic polypeptide
QVQLQQWGAGLLKPSETLSLTCAVYGGSFSGYYWSWIRQPPGKGLEWIGEINHSGSTNYNPSLKSRVTISVDTSKNQFSLKLSSVTAADTAVYYCARGRRFGDFDYWGQGTLVTVSSASTKGPSVFPLAPSSKSTSGGTAALGCLVKDYFPEPVTVSWNSGALTSGVHTFPAVLQSSGLYSLSSVVTVPSSSLGTQTYICNVNHKPSNTKVDKKVEPKSCDKTHTCPPCPAPELLGGPSVFLFPPKPKDTLMISRTPEVTCVVVDVSHEDPEVKFNWYVDGVEVHNAKTKPREEQYNSTYRVVSVLTVLHQDWLNGKEYKCKVSNKALPAPIEKTISKAKGQPREPQVYTLPPSREEMTKNQVSLTCLVKGFYPSDIAVEWESNGQPENNYKTTPPVLDSDGSFFLYSKLTVDKSRWQQGNVFSCSVMHEALHNHYTQKSLSLSPGKGGGGSGGGGSGGGGSSEVEYRAEVGQNAYLPCFYTPAAPGNLVPVCWGKGACPVFECGNVVLRTDERDVNYWTSRYWLNGDFRKGDVSLTIENVTLADSGIYCCRIQIPGIMNDEKFNLKLVIKPAKVTPAPTRQRDFTAAFPRMLTTRGHGPAETQTLGSLPDINLTQISTLANELRDSRLANDLRDSGATIRIG

SEQ ID NO: 274 - protein, 667 aa, Artificial Sequence
  Description of Artificial Sequence: Synthetic polypeptide
QVQLQQWGAGLLKPSETLSLTCAVYGGSFSGYYWSWIRQPPGKGLEWIGEINHSGSTNYNPSLKSRVTISVDTSKNQFSLKLSSVTAADTAVYYCARGRRFGDFDYWGQGTLVTVSSASTKGPSVFPLAPSSKSTSGGTAALGCLVKDYFPEPVTVSWNSGALTSGVHTFPAVLQSSGLYSLSSVVTVPSSSLGTQTYICNVNHKPSNTKVDKKVEPKSCDKTHTCPPCPAPELLGGPSVFLFPPKPKDTLMISRTPEVTCVVVDVSHEDPEVKFNWYVDGVEVHNAKTKPREEQYNSTYRVVSVLTVLHQDWLNGKEYKCKVSNKALPAPIEKTISKAKGQPREPQVYTLPPSREEMTKNQVSLTCLVKGFYPSDIAVEWESNGQPENNYKTTPPVLDSDGSFFLYSKLTVDKSRWQQGNVFSCSVMHEALHNHYTQKSLSLSPGKGGGGSGGGGSGGGGSSDTGRPFVEMYSEIPEIIHMTEGRELVIPCRVTSPNITVTLKKFPLDTLIPDGKRIIWDSRKGFIISNATYKEIGLLTCEATVNGHLYKTNYLTHRQTNTIIDVVLSPSHGIELSVGEKLVLNCTARTELNVGIDFNWEYPSSKHQHKKLVNRDLKTQSGSEMKKFLSTLTIDGVTRSDQGLYTCAASSGLMTKKNSTFVRVHEK

SEQ ID NO: 275 - protein, 588 aa, Artificial Sequence
  Description of Artificial Sequence: Synthetic polypeptide
QVQLVESGGGVVQPGRSLRLSCAASGFAFSRYGMHWVRQAPGKGLEWVAVIWYDGSNKYYADSVKGRFTISRDNSKNTQYLQMNSLRAEDTAVYYCARGGDFLYYYYYGMDVWGQGTTVTVSSASTKGPSVFPLAPSSKSTSGGTAALGCLVKDYFPEPVTVSWNSGALTSGVHTFPAVLQSSGLYSLSSVVTVPSSSLGTQTYICNVNHKPSNTKVDKKVEPKSCDKTHTCPPCPAPELLGGPSVFLFPPKPKDTLMISRTPEVTCVVVDVSHEDPEVKFNWYVDGVEVHNAKTKPREEQYNSTYRVVSVLTVLHQDWLNGKEYKCKVSNKALPAPIEKTISKAKGQPREPQVYTLPPSREEMTKNQVSLTCLVKGFYPSDIAVEWESNGQPENNYKTTPPVLDSDGSFFLYSKLTVDKSRWQQGNVFSCSVMHEALHNHYTQKSLSLSPGKGGGGSGGGGSGGGGSKESCDVQLYIKRQSEHSILAGDPFELECPVKYCANRPHVTWCKLNGTTCVKLEDRQTSWKEEKNISFFILHFEPVLPNDNGSYRCSANFQSNLIESHSTTLYVTDVKSASERPSKDEMAS

SEQ ID NO: 276 - protein, 618 aa, Artificial Sequence
  Description of Artificial Sequence: Synthetic polypeptide
QVQLVESGGGVVQPGRSLRLSCAASGFAFSRYGMHWVRQAPGKGLEWVAVIWYDGSNKYYADSVKGRFTISRDNSKNTQYLQMNSLRAEDTAVYYCARGGDFLYYYYYGMDVWGQGTTVTVSSASTKGPSVFPLAPSSKSTSGGTAALGCLVKDYFPEPVTVSWNSGALTSGVHTFPAVLQSSGLYSLSSVVTVPSSSLGTQTYICNVNHKPSNTKVDKKVEPKSCDKTHTCPPCPAPELLGGPSVFLFPPKPKDTLMISRTPEVTCVVVDVSHEDPEVKFNWYVDGVEVHNAKTKPREEQYNSTYRVVSVLTVLHQDWLNGKEYKCKVSNKALPAPIEKTISKAKGQPREPQVYTLPPSREEMTKNQVSLTCLVKGFYPSDIAVEWESNGQPENNYKTTPPVLDSDGSFFLYSKLTVDKSRWQQGNVFSCSVMHEALHNHYTQKSLSLSPGKGGGGSGGGGSGGGGSPGWFLDSPDRPWNPPTFSPALLVVTEGDNATFTCSFSNTSESFVLNWYRMSPSNQTDKLAAFPEDRSQPGQDCRFRVTQLPNGRDFHMSVVRARRNDSGTYLCGAISLAPKAQIKESLRAELRVTERRAEVPTAHPSPSPRPAGQFQTLV

SEQ ID NO: 277 - protein, 998 aa, Artificial Sequence
  Description of Artificial Sequence: Synthetic polypeptide
QVQLVESGGGVVQPGRSLRLSCAASGFAFSRYGMHWVRQAPGKGLEWVAVIWYDGSNKYYADSVKGRFTISRDNSKNTQYLQMNSLRAEDTAVYYCARGGDFLYYYYYGMDVWGQGTTVTVSSASTKGPSVFPLAPSSKSTSGGTAALGCLVKDYFPEPVTVSWNSGALTSGVHTFPAVLQSSGLYSLSSVVTVPSSSLGTQTYICNVNHKPSNTKVDKKVEPKSCDKTHTCPPCPAPELLGGPSVFLFPPKPKDTLMISRTPEVTCVVVDVSHEDPEVKFNWYVDGVEVHNAKTKPREEQYNSTYRVVSVLTVLHQDWLNGKEYKCKVSNKALPAPIEKTISKAKGQPREPQVYTLPPSREEMTKNQVSLTCLVKGFYPSDIAVEWESNGQPENNYKTTPPVLDSDGSFFLYSKLTVDKSRWQQGNVFSCSVMHEALHNHYTQKSLSLSPGKGGGGSGGGGSGGGGSMDGRFWIRVQESVMVPEGLCISVPCSFSYPRQDWTGSTPAYGYWFKAVTETTKGAPVATNHQSREVEMSTRGRFQLTGDPAKGNCSLVIRDAQMQDESQYFFRVERGSYVRYNFMNDGFFLKVTALTQKPDVYIPETLEPGQPVTVICVFNWAFEECPPPSFSWTGAALSSQGTKPTTSHFSVLSFTPRPQDHNTDLTCHVDFSRKGVSAQRTVRLRVAYAPRDLVISISRDNTPALEPQPQGNVPYLEAQKGQFLRLLCAADSQPPATLSWVLQNRVLSSSHPWGPRPLGLELPGVKAGDSGRYTCRAENRLGSQQRALDLSVQYPPENLRVMVSQANRTVLENLGNGTSLPVLEGQSLCLVCVTHSSPPARLSWTQRGQVLSPSQPSDPGVLELPRVQVEHEGEFTCHARHPLGSQHVSLSLSVHYSPKLLGPSCSWEAEGLHCSCSSQASPAPSLRWWLGEELLEGNSSQDSFEVTPSSAGPWANSSLSLHGGLSSGLRLRCEAWNVHGAQSGSILQLPDKKGLIST

SEQ ID NO: 278 - protein, 587 aa, Artificial Sequence
  Description of Artificial Sequence: Synthetic polypeptide
QVQLVESGGGVVQPGRSLRLSCAASGFAFSRYGMHWVRQAPGKGLEWVAVIWYDGSNKYYADSVKGRFTISRDNSKNTQYLQMNSLRAEDTAVYYCARGGDFLYYYYYGMDVWGQGTTVTVSSASTKGPSVFPLAPSSKSTSGGTAALGCLVKDYFPEPVTVSWNSGALTSGVHTFPAVLQSSGLYSLSSVVTVPSSSLGTQTYICNVNHKPSNTKVDKKVEPKSCDKTHTCPPCPAPELLGGPSVFLFPPKPKDTLMISRTPEVTCVVVDVSHEDPEVKFNWYVDGVEVHNAKTKPREEQYNSTYRVVSVLTVLHQDWLNGKEYKCKVSNKALPAPIEKTISKAKGQPREPQVYTLPPSREEMTKNQVSLTCLVKGFYPSDIAVEWESNGQPENNYKTTPPVLDSDGSFFLYSKLTVDKSRWQQGNVFSCSVMHEALHNHYTQKSLSLSPGKGGGGSGGGGSGGGGSEEELQVIQPDKSVLVAAGETATLRCTATSLIPVGPIQWFRGAGPGRELIYNQKEGHFPRVTTVSDLTKRNNMDFSIRIGNITPADAGTYYCVKFRKGSPDDVEFKSGAGTELSVRAKPS

SEQ ID NO: 279 - protein, 605 aa, Artificial Sequence
  Description of Artificial Sequence: Synthetic polypeptide
QVQLVESGGGVVQPGRSLRLSCAASGFAFSRYGMHWVRQAPGKGLEWVAVIWYDGSNKYYADSVKGRFTISRDNSKNTQYLQMNSLRAEDTAVYYCARGGDFLYYYYYGMDVWGQGTTVTVSSASTKGPSVFPLAPSSKSTSGGTAALGCLVKDYFPEPVTVSWNSGALTSGVHTFPAVLQSSGLYSLSSVVTVPSSSLGTQTYICNVNHKPSNTKVDKKVEPKSCDKTHTCPPCPAPELLGGPSVFLFPPKPKDTLMISRTPEVTCVVVDVSHEDPEVKFNWYVDGVEVHNAKTKPREEQYNSTYRVVSVLTVLHQDWLNGKEYKCKVSNKALPAPIEKTISKAKGQPREPQVYTLPPSREEMTKNQVSLTCLVKGFYPSDIAVEWESNGQPENNYKTTPPVLDSDGSFFLYSKLTVDKSRWQQGNVFSCSVMHEALHNHYTQKSLSLSPGKGGGGSGGGGSGGGGSTIPPHVQKSVNNDMIVTDNNGAVKFPQLCKFCDVRFSTCDNQKSCMSNCSITSICEKPQEVCVAVWRKNDENITLETVCHDPKLPYHDFILEDAASPKCIMKEKKKPGETFFMCSCSSDECNDNIIFSEEYNTSNPD

SEQ ID NO: 280 - protein, 649 aa, Artificial Sequence
  Description of Artificial Sequence: Synthetic polypeptide
QVQLVESGGGVVQPGRSLRLSCAASGFAFSRYGMHWVRQAPGKGLEWVAVIWYDGSNKYYADSVKGRFTISRDNSKNTQYLQMNSLRAEDTAVYYCARGGDFLYYYYYGMDVWGQGTTVTVSSASTKGPSVFPLAPSSKSTSGGTAALGCLVKDYFPEPVTVSWNSGALTSGVHTFPAVLQSSGLYSLSSVVTVPSSSLGTQTYICNVNHKPSNTKVDKKVEPKSCDKTHTCPPCPAPELLGGPSVFLFPPKPKDTLMISRTPEVTCVVVDVSHEDPEVKFNWYVDGVEVHNAKTKPREEQYNSTYRVVSVLTVLHQDWLNGKEYKCKVSNKALPAPIEKTISKAKGQPREPQVYTLPPSREEMTKNQVSLTCLVKGFYPSDIAVEWESNGQPENNYKTTPPVLDSDGSFFLYSKLTVDKSRWQQGNVFSCSVMHEALHNHYTQKSLSLSPGKGGGGSGGGGSGGGGSSEVEYRAEVGQNAYLPCFYTPAAPGNLVPVCWGKGACPVFECGNVVLRTDERDVNYWTSRYWLNGDFRKGDVSLTIENVTLADSGIYCCRIQIPGIMNDEKFNLKLVIKPAKVTPAPTRQRDFTAAFPRMLTTRGHGPAETQTLGSLPDINLTQISTLANELRDSRLANDLRDSGATIRIG

SEQ ID NO: 281 - protein, 673 aa, Artificial Sequence
  Description of Artificial Sequence: Synthetic polypeptide
QVQLVESGGGVVQPGRSLRLSCAASGFAFSRYGMHWVRQAPGKGLEWVAVIWYDGSNKYYADSVKGRFTISRDNSKNTQYLQMNSLRAEDTAVYYCARGGDFLYYYYYGMDVWGQGTTVTVSSASTKGPSVFPLAPSSKSTSGGTAALGCLVKDYFPEPVTVSWNSGALTSGVHTFPAVLQSSGLYSLSSVVTVPSSSLGTQTYICNVNHKPSNTKVDKKVEPKSCDKTHTCPPCPAPELLGGPSVFLFPPKPKDTLMISRTPEVTCVVVDVSHEDPEVKFNWYVDGVEVHNAKTKPREEQYNSTYRVVSVLTVLHQDWLNGKEYKCKVSNKALPAPIEKTISKAKGQPREPQVYTLPPSREEMTKNQVSLTCLVKGFYPSDIAVEWESNGQPENNYKTTPPVLDSDGSFFLYSKLTVDKSRWQQGNVFSCSVMHEALHNHYTQKSLSLSPGKGGGGSGGGGSGGGGSSDTGRPFVEMYSEIPEIIHMTEGRELVIPCRVTSPNITVTLKKFPLDTLIPDGKRIIWDSRKGFIISNATYKEIGLLTCEATVNGHLYKTNYLTHRQTNTIIDVVLSPSHGIELSVGEKLVLNCTARTELNVGIDFNWEYPSSKHQHKKLVNRDLKTQSGSEMKKFLSTLTIDGVTRSDQGLYTCAASSGLMTKKNSTFVRVHEK

SEQ ID NO: 282 - protein, 584 aa, Artificial Sequence
  Description of Artificial Sequence: Synthetic polypeptide
EVQLVESGGGVVQPGRSLRLSCSASGFDFTTYWMSWVRQAPGKGLEWIGEIHPDSSTINYAPSLKDRFTISRDNAKNTLFLQMDSLRPEDTGVYFCASLYFGFPWFAYWGQGTPVTVSSASTKGPSVFPLAPSSKSTSGGTAALGCLVKDYFPEPVTVSWNSGALTSGVHTFPAVLQSSGLYSLSSVVTVPSSSLGTQTYICNVNHKPSNTKVDKRVEPKSCDKTHTCPPCPAPELLGGPSVFLFPPKPKDTLMISRTPEVTCVVVDVSHEDPEVKFNWYVDGVEVHNAKTKPREEQYNSTYRVVSVLTVLHQDWLNGKEYKCKVSNKALPAPIEKTISKAKGQPREPQVYTLPPSREEMTKNQVSLTCLVKGFYPSDIAVEWESNGQPENNYKTTPPVLDSDGSFFLYSKLTVDKSRWQQGNVFSCSVMHEALHNHYTQKSLSLSPGKGGGGSGGGGSGGGGSKESCDVQLYIKRQSEHSILAGDPFELECPVKYCANRPHVTWCKLNGTTCVKLEDRQTSWKEEKNISFFILHFEPVLPNDNGSYRCSANFQSNLIESHSTTLYVTDVKSASERPSKDEMAS

SEQ ID NO: 283 - protein, 614 aa, Artificial Sequence
  Description of Artificial Sequence: Synthetic polypeptide
EVQLVESGGGVVQPGRSLRLSCSASGFDFTTYWMSWVRQAPGKGLEWIGEIHPDSSTINYAPSLKDRFTISRDNAKNTLFLQMDSLRPEDTGVYFCASLYFGFPWFAYWGQGTPVTVSSASTKGPSVFPLAPSSKSTSGGTAALGCLVKDYFPEPVTVSWNSGALTSGVHTFPAVLQSSGLYSLSSVVTVPSSSLGTQTYICNVNHKPSNTKVDKRVEPKSCDKTHTCPPCPAPELLGGPSVFLFPPKPKDTLMISRTPEVTCVVVDVSHEDPEVKFNWYVDGVEVHNAKTKPREEQYNSTYRVVSVLTVLHQDWLNGKEYKCKVSNKALPAPIEKTISKAKGQPREPQVYTLPPSREEMTKNQVSLTCLVKGFYPSDIAVEWESNGQPENNYKTTPPVLDSDGSFFLYSKLTVDKSRWQQGNVFSCSVMHEALHNHYTQKSLSLSPGKGGGGSGGGGSGGGGSPGWFLDSPDRPWNPPTFSPALLVVTEGDNATFTCSFSNTSESFVLNWYRMSPSNQTDKLAAFPEDRSQPGQDCRFRVTQLPNGRDFHMSVVRARRNDSGTYLCGAISLAPKAQIKESLRAELRVTERRAEVPTAHPSPSPRPAGQFQTLV

SEQ ID NO: 284 - protein, 994 aa, Artificial Sequence
  Description of Artificial Sequence: Synthetic polypeptide
EVQLVESGGGVVQPGRSLRLSCSASGFDFTTYWMSWVRQAPGKGLEWIGEIHPDSSTINYAPSLKDRFTISRDNAKNTLFLQMDSLRPEDTGVYFCASLYFGFPWFAYWGQGTPVTVSSASTKGPSVFPLAPSSKSTSGGTAALGCLVKDYFPEPVTVSWNSGALTSGVHTFPAVLQSSGLYSLSSVVTVPSSSLGTQTYICNVNHKPSNTKVDKRVEPKSCDKTHTCPPCPAPELLGGPSVFLFPPKPKDTLMISRTPEVTCVVVDVSHEDPEVKFNWYVDGVEVHNAKTKPREEQYNSTYRVVSVLTVLHQDWLNGKEYKCKVSNKALPAPIEKTISKAKGQPREPQVYTLPPSREEMTKNQVSLTCLVKGFYPSDIAVEWESNGQPENNYKTTPPVLDSDGSFFLYSKLTVDKSRWQQGNVFSCSVMHEALHNHYTQKSLSLSPGKGGGGSGGGGSGGGGSMDGRFWIRVQESVMVPEGLCISVPCSFSYPRQDWTGSTPAYGYWFKAVTETTKGAPVATNHQSREVEMSTRGRFQLTGDPAKGNCSLVIRDAQMQDESQYFFRVERGSYVRYNFMNDGFFLKVTALTQKPDVYIPETLEPGQPVTVICVFNWAFEECPPPSFSWTGAALSSQGTKPTTSHFSVLSFTPRPQDHNTDLTCHVDFSRKGVSAQRTVRLRVAYAPRDLVISISRDNTPALEPQPQGNVPYLEAQKGQFLRLLCAADSQPPATLSWVLQNRVLSSSHPWGPRPLGLELPGVKAGDSGRYTCRAENRLGSQQRALDLSVQYPPENLRVMVSQANRTVLENLGNGTSLPVLEGQSLCLVCVTHSSPPARLSWTQRGQVLSPSQPSDPGVLELPRVQVEHEGEFTCHARHPLGSQHVSLSLSVHYSPKLLGPSCSWEAEGLHCSCSSQASPAPSLRWWLGEELLEGNSSQDSFEVTPSSAGPWANSSLSLHGGLSSGLRLRCEAWNVHGAQSGSILQLPDKKGLIST

SEQ ID NO: 285 - protein, 583 aa, Artificial Sequence
  Description of Artificial Sequence: Synthetic polypeptide
EVQLVESGGGVVQPGRSLRLSCSASGFDFTTYWMSWVRQAPGKGLEWIGEIHPDSSTINYAPSLKDRFTISRDNAKNTLFLQMDSLRPEDTGVYFCASLYFGFPWFAYWGQGTPVTVSSASTKGPSVFPLAPSSKSTSGGTAALGCLVKDYFPEPVTVSWNSGALTSGVHTFPAVLQSSGLYSLSSVVTVPSSSLGTQTYICNVNHKPSNTKVDKRVEPKSCDKTHTCPPCPAPELLGGPSVFLFPPKPKDTLMISRTPEVTCVVVDVSHEDPEVKFNWYVDGVEVHNAKTKPREEQYNSTYRVVSVLTVLHQDWLNGKEYKCKVSNKALPAPIEKTISKAKGQPREPQVYTLPPSREEMTKNQVSLTCLVKGFYPSDIAVEWESNGQPENNYKTTPPVLDSDGSFFLYSKLTVDKSRWQQGNVFSCSVMHEALHNHYTQKSLSLSPGKGGGGSGGGGSGGGGSEEELQVIQPDKSVLVAAGETATLRCTATSLIPVGPIQWFRGAGPGRELIYNQKEGHFPRVTTVSDLTKRNNMDFSIRIGNITPADAGTYYCVKFRKGSPDDVEFKSGAGTELSVRAKPS

SEQ ID NO: 286 - protein, 601 aa, Artificial Sequence
  Description of Artificial Sequence: Synthetic polypeptide
EVQLVESGGGVVQPGRSLRLSCSASGFDFTTYWMSWVRQAPGKGLEWIGEIHPDSSTINYAPSLKDRFTISRDNAKNTLFLQMDSLRPEDTGVYFCASLYFGFPWFAYWGQGTPVTVSSASTKGPSVFPLAPSSKSTSGGTAALGCLVKDYFPEPVTVSWNSGALTSGVHTFPAVLQSSGLYSLSSVVTVPSSSLGTQTYICNVNHKPSNTKVDKRVEPKSCDKTHTCPPCPAPELLGGPSVFLFPPKPKDTLMISRTPEVTCVVVDVSHEDPEVKFNWYVDGVEVHNAKTKPREEQYNSTYRVVSVLTVLHQDWLNGKEYKCKVSNKALPAPIEKTISKAKGQPREPQVYTLPPSREEMTKNQVSLTCLVKGFYPSDIAVEWESNGQPENNYKTTPPVLDSDGSFFLYSKLTVDKSRWQQGNVFSCSVMHEALHNHYTQKSLSLSPGKGGGGSGGGGSGGGGSTIPPHVQKSVNNDMIVTDNNGAVKFPQLCKFCDVRFSTCDNQKSCMSNCSITSICEKPQEVCVAVWRKNDENITLETVCHDPKLPYHDFILEDAASPKCIMKEKKKPGETFFMCSCSSDECNDNIIFSEEYNTSNPD

SEQ ID NO: 287 - protein, 645 aa, Artificial Sequence
  Description of Artificial Sequence: Synthetic polypeptide
EVQLVESGGGVVQPGRSLRLSCSASGFDFTTYWMSWVRQAPGKGLEWIGEIHPDSSTINYAPSLKDRFTISRDNAKNTLFLQMDSLRPEDTGVYFCASLYFGFPWFAYWGQGTPVTVSSASTKGPSVFPLAPSSKSTSGGTAALGCLVKDYFPEPVTVSWNSGALTSGVHTFPAVLQSSGLYSLSSVVTVPSSSLGTQTYICNVNHKPSNTKVDKRVEPKSCDKTHTCPPCPAPELLGGPSVFLFPPKPKDTLMISRTPEVTCVVVDVSHEDPEVKFNWYVDGVEVHNAKTKPREEQYNSTYRVVSVLTVLHQDWLNGKEYKCKVSNKALPAPIEKTISKAKGQPREPQVYTLPPSREEMTKNQVSLTCLVKGFYPSDIAVEWESNGQPENNYKTTPPVLDSDGSFFLYSKLTVDKSRWQQGNVFSCSVMHEALHNHYTQKSLSLSPGKGGGGSGGGGSGGGGSSEVEYRAEVGQNAYLPCFYTPAAPGNLVPVCWGKGACPVFECGNVVLRTDERDVNYWTSRYWLNGDFRKGDVSLTIENVTLADSGIYCCRIQIPGIMNDEKFNLKLVIKPAKVTPAPTRQRDFTAAFPRMLTTRGHGPAETQTLGSLPDINLTQISTLANELRDSRLANDLRDSGATIRIG

SEQ ID NO: 288 - protein, 669 aa, Artificial Sequence
  Description of Artificial Sequence: Synthetic polypeptide
EVQLVESGGGVVQPGRSLRLSCSASGFDFTTYWMSWVRQAPGKGLEWIGEIHPDSSTINYAPSLKDRFTISRDNAKNTLFLQMDSLRPEDTGVYFCASLYFGFPWFAYWGQGTPVTVSSASTKGPSVFPLAPSSKSTSGGTAALGCLVKDYFPEPVTVSWNSGALTSGVHTFPAVLQSSGLYSLSSVVTVPSSSLGTQTYICNVNHKPSNTKVDKRVEPKSCDKTHTCPPCPAPELLGGPSVFLFPPKPKDTLMISRTPEVTCVVVDVSHEDPEVKFNWYVDGVEVHNAKTKPREEQYNSTYRVVSVLTVLHQDWLNGKEYKCKVSNKALPAPIEKTISKAKGQPREPQVYTLPPSREEMTKNQVSLTCLVKGFYPSDIAVEWESNGQPENNYKTTPPVLDSDGSFFLYSKLTVDKSRWQQGNVFSCSVMHEALHNHYTQKSLSLSPGKGGGGSGGGGSGGGGSSDTGRPFVEMYSEIPEIIHMTEGRELVIPCRVTSPNITVTLKKFPLDTLIPDGKRIIWDSRKGFIISNATYKEIGLLTCEATVNGHLYKTNYLTHRQTNTIIDVVLSPSHGIELSVGEKLVLNCTARTELNVGIDFNWEYPSSKHQHKKLVNRDLKTQSGSEMKKFLSTLTIDGVTRSDQGLYTCAASSGLMTKKNSTFVRVHEK

SEQ ID NO: 289 - protein, 587 aa, Artificial Sequence
  Description of Artificial Sequence: Synthetic polypeptide
EVQLLESGGGLVQPGGSLRLSCAVSGFTFNSFAMSWVRQAPGKGLEWVSAISGSGGGTYYADSVKGRFTISRDNSKNTLYLQMNSLRAEDTAVYFCAKDKILWFGEPVFDYWGQGTLVTVSSASTKGPSVFPLAPSSKSTSGGTAALGCLVKDYFPEPVTVSWNSGALTSGVHTFPAVLQSSGLYSLSSVVTVPSSSLGTQTYICNVNHKPSNTKVDKRVEPKSCDKTHTCPPCPAPELLGGPSVFLFPPKPKDTLMISRTPEVTCVVVDVSHEDPEVKFNWYVDGVEVHNAKTKPREEQYNSTYRVVSVLTVLHQDWLNGKEYKCKVSNKALPAPIEKTISKAKGQPREPQVYTLPPSREEMTKNQVSLTCLVKGFYPSDIAVEWESNGQPENNYKTTPPVLDSDGSFFLYSKLTVDKSRWQQGNVFSCSVMHEALHNHYTQKSLSLSPGKGGGGSGGGGSGGGGSKESCDVQLYIKRQSEHSILAGDPFELECPVKYCANRPHVTWCKLNGTTCVKLEDRQTSWKEEKNISFFILHFEPVLPNDNGSYRCSANFQSNLIESHSTTLYVTDVKSASERPSKDEMAS

SEQ ID NO: 290 - protein, 379 aa, Artificial Sequence
  Description of Artificial Sequence: Synthetic polypeptide
EIVLTQSPATLSLSPGERATLSCRASQSVSSYLAWYQQKPGQAPRLLIYDASNRATGIPARFSGSGSGTDFTLTISSLEPEDFAVYYCQQRSNWPPTFGQGTKVEIKRTVAAPSVFIFPPSDEQLKSGTASVVCLLNNFYPREAKVQWKVDNALQSGNSQESVTEQDSKDSTYSLSSTLTLSKADYEKHKVYACEVTHQGLSSPVTKSFNRGECGGGGSGGGGSGGGGSPGWFLDSPDRPWNPPTFSPALLVVTEGDNATFTCSFSNTSESFVLNWYRMSPSNQTDKLAAFPEDRSQPGQDCRFRVTQLPNGRDFHMSVVRARRNDSGTYLCGAISLAPKAQIKESLRAELRVTERRAEVPTAHPSPSPRPAGQFQTLV

SEQ ID NO: 291 - protein, 759 aa, Artificial Sequence
  Description of Artificial Sequence: Synthetic polypeptide
EIVLTQSPATLSLSPGERATLSCRASQSVSSYLAWYQQKPGQAPRLLIYDASNRATGIPARFSGSGSGTDFTLTISSLEPEDFAVYYCQQRSNWPPTFGQGTKVEIKRTVAAPSVFIFPPSDEQLKSGTASVVCLLNNFYPREAKVQWKVDNALQSGNSQESVTEQDSKDSTYSLSSTLTLSKADYEKHKVYACEVTHQGLSSPVTKSFNRGECGGGGSGGGGSGGGGSMDGRFWIRVQESVMVPEGLCISVPCSFSYPRQDWTGSTPAYGYWFKAVTETTKGAPVATNHQSREVEMSTRGRFQLTGDPAKGNCSLVIRDAQMQDESQYFFRVERGSYVRYNFMNDGFFLKVTALTQKPDVYIPETLEPGQPVTVICVFNWAFEECPPPSFSWTGAALSSQGTKPTTSHFSVLSFTPRPQDHNTDLTCHVDFSRKGVSAQRTVRLRVAYAPRDLVISISRDNTPALEPQPQGNVPYLEAQKGQFLRLLCAADSQPPATLSWVLQNRVLSSSHPWGPRPLGLELPGVKAGDSGRYTCRAENRLGSQQRALDLSVQYPPENLRVMVSQANRTVLENLGNGTSLPVLEGQSLCLVCVTHSSPPARLSWTQRGQVLSPSQPSDPGVLELPRVQVEHEGEFTCHARHPLGSQHVSLSLSVHYSPKLLGPSCSWEAEGLHCSCSSQASPAPSLRWWLGEELLEGNSSQDSFEVTPSSAGPWANSSLSLHGGLSSGLRLRCEAWNVHGAQSGSILQLPDKKGLIST

SEQ ID NO: 292 - protein, 348 aa, Artificial Sequence
  Description of Artificial Sequence: Synthetic polypeptide
EIVLTQSPATLSLSPGERATLSCRASQSVSSYLAWYQQKPGQAPRLLIYDASNRATGIPARFSGSGSGTDFTLTISSLEPEDFAVYYCQQRSNWPPTFGQGTKVEIKRTVAAPSVFIFPPSDEQLKSGTASVVCLLNNFYPREAKVQWKVDNALQSGNSQESVTEQDSKDSTYSLSSTLTLSKADYEKHKVYACEVTHQGLSSPVTKSFNRGECGGGGSGGGGSGGGGSEEELQVIQPDKSVLVAAGETATLRCTATSLIPVGPIQWFRGAGPGRELIYNQKEGHFPRVTTVSDLTKRNNMDFSIRIGNITPADAGTYYCVKFRKGSPDDVEFKSGAGTELSVRAKPS

SEQ ID NO: 293 - protein, 410 aa, Artificial Sequence
  Description of Artificial Sequence: Synthetic polypeptide
EIVLTQSPATLSLSPGERATLSCRASQSVSSYLAWYQQKPGQAPRLLIYDASNRATGIPARFSGSGSGTDFTLTISSLEPEDFAVYYCQQRSNWPPTFGQGTKVEIKRTVAAPSVFIFPPSDEQLKSGTASVVCLLNNFYPREAKVQWKVDNALQSGNSQESVTEQDSKDSTYSLSSTLTLSKADYEKHKVYACEVTHQGLSSPVTKSFNRGECGGGGSGGGGSGGGGSSEVEYRAEVGQNAYLPCFYTPAAPGNLVPVCWGKGACPVFECGNVVLRTDERDVNYWTSRYWLNGDFRKGDVSLTIENVTLADSGIYCCRIQIPGIMNDEKFNLKLVIKPAKVTPAPTRQRDFTAAFPRMLTTRGHGPAETQTLGSLPDINLTQISTLANELRDSRLANDLRDSGATIRIG

SEQ ID NO: 294 - protein, 617 aa, Artificial Sequence
  Description of Artificial Sequence: Synthetic polypeptide
EVQLLESGGGLVQPGGSLRLSCAVSGFTFNSFAMSWVRQAPGKGLEWVSAISGSGGGTYYADSVKGRFTISRDNSKNTLYLQMNSLRAEDTAVYFCAKDKILWFGEPVFDYWGQGTLVTVSSASTKGPSVFPLAPSSKSTSGGTAALGCLVKDYFPEPVTVSWNSGALTSGVHTFPAVLQSSGLYSLSSVVTVPSSSLGTQTYICNVNHKPSNTKVDKRVEPKSCDKTHTCPPCPAPELLGGPSVFLFPPKPKDTLMISRTPEVTCVVVDVSHEDPEVKFNWYVDGVEVHNAKTKPREEQYNSTYRVVSVLTVLHQDWLNGKEYKCKVSNKALPAPIEKTISKAKGQPREPQVYTLPPSREEMTKNQVSLTCLVKGFYPSDIAVEWESNGQPENNYKTTPPVLDSDGSFFLYSKLTVDKSRWQQGNVFSCSVMHEALHNHYTQKSLSLSPGKGGGGSGGGGSGGGGSPGWFLDSPDRPWNPPTFSPALLVVTEGDNATFTCSFSNTSESFVLNWYRMSPSNQTDKLAAFPEDRSQPGQDCRFRVTQLPNGRDFHMSVVRARRNDSGTYLCGAISLAPKAQIKESLRAELRVTERRAEVPTAHPSPSPRPAGQFQTLV

SEQ ID NO: 295 - protein, 349 aa, Artificial Sequence
  Description of Artificial Sequence: Synthetic polypeptide
EIVLTQSPATLSLSPGERATLSCRASQSVSSYLAWYQQKPGQAPRLLIYDASNRATGIPARFSGSGSGTDFTLTISSLEPEDFAVYYCQQRSNWPPTFGQGTKVEIKRTVAAPSVFIFPPSDEQLKSGTASVVCLLNNFYPREAKVQWKVDNALQSGNSQESVTEQDSKDSTYSLSSTLTLSKADYEKHKVYACEVTHQGLSSPVTKSFNRGECGGGGSGGGGSGGGGSKESCDVQLYIKRQSEHSILAGDPFELECPVKYCANRPHVTWCKLNGTTCVKLEDRQTSWKEEKNISFFILHFEPVLPNDNGSYRCSANFQSNLIESHSTTLYVTDVKSASERPSKDEMAS

SEQ ID NO: 296 - protein, 997 aa, Artificial Sequence
  Description of Artificial Sequence: Synthetic polypeptide
EVQLLESGGGLVQPGGSLRLSCAVSGFTFNSFAMSWVRQAPGKGLEWVSAISGSGGGTYYADSVKGRFTISRDNSKNTLYLQMNSLRAEDTAVYFCAKDKILWFGEPVFDYWGQGTLVTVSSASTKGPSVFPLAPSSKSTSGGTAALGCLVKDYFPEPVTVSWNSGALTSGVHTFPAVLQSSGLYSLSSVVTVPSSSLGTQTYICNVNHKPSNTKVDKRVEPKSCDKTHTCPPCPAPELLGGPSVFLFPPKPKDTLMISRTPEVTCVVVDVSHEDPEVKFNWYVDGVEVHNAKTKPREEQYNSTYRVVSVLTVLHQDWLNGKEYKCKVSNKALPAPIEKTISKAKGQPREPQVYTLPPSREEMTKNQVSLTCLVKGFYPSDIAVEWESNGQPENNYKTTPPVLDSDGSFFLYSKLTVDKSRWQQGNVFSCSVMHEALHNHYTQKSLSLSPGKGGGGSGGGGSGGGGSMDGRFWIRVQESVMVPEGLCISVPCSFSYPRQDWTGSTPAYGYWFKAVTETTKGAPVATNHQSREVEMSTRGRFQLTGDPAKGNCSLVIRDAQMQDESQYFFRVERGSYVRYNFMNDGFFLKVTALTQKPDVYIPETLEPGQPVTVICVFNWAFEECPPPSFSWTGAALSSQGTKPTTSHFSVLSFTPRPQDHNTDLTCHVDFSRKGVSAQRTVRLRVAYAPRDLVISISRDNTPALEPQPQGNVPYLEAQKGQFLRLLCAADSQPPATLSWVLQNRVLSSSHPWGPRPLGLELPGVKAGDSGRYTCRAENRLGSQQRALDLSVQYPPENLRVMVSQANRTVLENLGNGTSLPVLEGQSLCLVCVTHSSPPARLSWTQRGQVLSPSQPSDPGVLELPRVQVEHEGEFTCHARHPLGSQHVSLSLSVHYSPKLLGPSCSWEAEGLHCSCSSQASPAPSLRWWLGEELLEGNSSQDSFEVTPSSAGPWANSSLSLHGGLSSGLRLRCEAWNVHGAQSGSILQLPDKKGLIST

SEQ ID NO: 297 - protein, 586 aa, Artificial Sequence
  Description of Artificial Sequence: Synthetic polypeptide
EVQLLESGGGLVQPGGSLRLSCAVSGFTFNSFAMSWVRQAPGKGLEWVSAISGSGGGTYYADSVKGRFTISRDNSKNTLYLQMNSLRAEDTAVYFCAKDKILWFGEPVFDYWGQGTLVTVSSASTKGPSVFPLAPSSKSTSGGTAALGCLVKDYFPEPVTVSWNSGALTSGVHTFPAVLQSSGLYSLSSVVTVPSSSLGTQTYICNVNHKPSNTKVDKRVEPKSCDKTHTCPPCPAPELLGGPSVFLFPPKPKDTLMISRTPEVTCVVVDVSHEDPEVKFNWYVDGVEVHNAKTKPREEQYNSTYRVVSVLTVLHQDWLNGKEYKCKVSNKALPAPIEKTISKAKGQPREPQVYTLPPSREEMTKNQVSLTCLVKGFYPSDIAVEWESNGQPENNYKTTPPVLDSDGSFFLYSKLTVDKSRWQQGNVFSCSVMHEALHNHYTQKSLSLSPGKGGGGSGGGGSGGGGSEEELQVIQPDKSVLVAAGETATLRCTATSLIPVGPIQWFRGAGPGRELIYNQKEGHFPRVTTVSDLTKRNNMDFSIRIGNITPADAGTYYCVKFRKGSPDDVEFKSGAGTELSVRAKPS

SEQ ID NO: 298 - protein, 604 aa, Artificial Sequence
  Description of Artificial Sequence: Synthetic polypeptide
EVQLLESGGGLVQPGGSLRLSCAVSGFTFNSFAMSWVRQAPGKGLEWVSAISGSGGGTYYADSVKGRFTISRDNSKNTLYLQMNSLRAEDTAVYFCAKDKILWFGEPVFDYWGQGTLVTVSSASTKGPSVFPLAPSSKSTSGGTAALGCLVKDYFPEPVTVSWNSGALTSGVHTFPAVLQSSGLYSLSSVVTVPSSSLGTQTYICNVNHKPSNTKVDKRVEPKSCDKTHTCPPCPAPELLGGPSVFLFPPKPKDTLMISRTPEVTCVVVDVSHEDPEVKFNWYVDGVEVHNAKTKPREEQYNSTYRVVSVLTVLHQDWLNGKEYKCKVSNKALPAPIEKTISKAKGQPREPQVYTLPPSREEMTKNQVSLTCLVKGFYPSDIAVEWESNGQPENNYKTTPPVLDSDGSFFLYSKLTVDKSRWQQGNVFSCSVMHEALHNHYTQKSLSLSPGKGGGGSGGGGSGGGGSTIPPHVQKSVNNDMIVTDNNGAVKFPQLCKFCDVRFSTCDNQKSCMSNCSITSICEKPQEVCVAVWRKNDENITLETVCHDPKLPYHDFILEDAASPKCIMKEKKKPGETFFMCSCSSDECNDNIIFSEEYNTSNPD

SEQ ID NO: 299 - protein, 648 aa, Artificial Sequence
  Description of Artificial Sequence: Synthetic polypeptide
EVQLLESGGGLVQPGGSLRLSCAVSGFTFNSFAMSWVRQAPGKGLEWVSAISGSGGGTYYADSVKGRFTISRDNSKNTLYLQMNSLRAEDTAVYFCAKDKILWFGEPVFDYWGQGTLVTVSSASTKGPSVFPLAPSSKSTSGGTAALGCLVKDYFPEPVTVSWNSGALTSGVHTFPAVLQSSGLYSLSSVVTVPSSSLGTQTYICNVNHKPSNTKVDKRVEPKSCDKTHTCPPCPAPELLGGPSVFLFPPKPKDTLMISRTPEVTCVVVDVSHEDPEVKFNWYVDGVEVHNAKTKPREEQYNSTYRVVSVLTVLHQDWLNGKEYKCKVSNKALPAPIEKTISKAKGQPREPQVYTLPPSREEMTKNQVSLTCLVKGFYPSDIAVEWESNGQPENNYKTTPPVLDSDGSFFLYSKLTVDKSRWQQGNVFSCSVMHEALHNHYTQKSLSLSPGKGGGGSGGGGSGGGGSSEVEYRAEVGQNAYLPCFYTPAAPGNLVPVCWGKGACPVFECGNVVLRTDERDVNYWTSRYWLNGDFRKGDVSLTIENVTLADSGIYCCRIQIPGIMNDEKFNLKLVIKPAKVTPAPTRQRDFTAAFPRMLTTRGHGPAETQTLGSLPDINLTQISTLANELRDSRLANDLRDSGATIRIG

SEQ ID NO: 300 - protein, 672 aa, Artificial Sequence
  Description of Artificial Sequence: Synthetic polypeptide
EVQLLESGGGLVQPGGSLRLSCAVSGFTFNSFAMSWVRQAPGKGLEWVSAISGSGGGTYYADSVKGRFTISRDNSKNTLYLQMNSLRAEDTAVYFCAKDKILWFGEPVFDYWGQGTLVTVSSASTKGPSVFPLAPSSKSTSGGTAALGCLVKDYFPEPVTVSWNSGALTSGVHTFPAVLQSSGLYSLSSVVTVPSSSLGTQTYICNVNHKPSNTKVDKRVEPKSCDKTHTCPPCPAPELLGGPSVFLFPPKPKDTLMISRTPEVTCVVVDVSHEDPEVKFNWYVDGVEVHNAKTKPREEQYNSTYRVVSVLTVLHQDWLNGKEYKCKVSNKALPAPIEKTISKAKGQPREPQVYTLPPSREEMTKNQVSLTCLVKGFYPSDIAVEWESNGQPENNYKTTPPVLDSDGSFFLYSKLTVDKSRWQQGNVFSCSVMHEALHNHYTQKSLSLSPGKGGGGSGGGGSGGGGSSDTGRPFVEMYSEIPEIIHMTEGRELVIPCRVTSPNITVTLKKFPLDTLIPDGKRIIWDSRKGFIISNATYKEIGLLTCEATVNGHLYKTNYLTHRQTNTIIDVVLSPSHGIELSVGEKLVLNCTARTELNVGIDFNWEYPSSKHQHKKLVNRDLKTQSGSEMKKFLSTLTIDGVTRSDQGLYTCAASSGLMTKKNSTFVRVHEK

SEQ ID NO: 301 - protein, 584 aa, Artificial Sequence
  Description of Artificial Sequence: Synthetic polypeptide
EVQLVESGGGLVQPGGSLRLSCAASGFDFSRYWMSWVRQAPGKGLEWIGEINPDSSTINYAPSLKDKFIISRDNAKNSLYLQMNSLRAEDTAVYYCARPDGNYWYFDVWGQGTLVTVSSASTKGPSVFPLAPSSKSTSGGTAALGCLVKDYFPEPVTVSWNSGALTSGVHTFPAVLQSSGLYSLSSVVTVPSSSLGTQTYICNVNHKPSNTKVDKKVEPKSCDKTHTCPPCPAPELLGGPSVFLFPPKPKDTLMISRTPEVTCVVVDVSHEDPEVKFNWYVDGVEVHNAKTKPREEQYNSTYRVVSVLTVLHQDWLNGKEYKCKVSNKALPAPIEKTISKAKGQPREPQVYTLPPSRDELTKNQVSLTCLVKGFYPSDIAVEWESNGQPENNYKTTPPVLDSDGSFFLYSKLTVDKSRWQQGNVFSCSVMHEALHNHYTQKSLSLSPGKGGGGSGGGGSGGGGSKESCDVQLYIKRQSEHSILAGDPFELECPVKYCANRPHVTWCKLNGTTCVKLEDRQTSWKEEKNISFFILHFEPVLPNDNGSYRCSANFQSNLIESHSTTLYVTDVKSASERPSKDEMAS

SEQ ID NO: 302 - protein, 379 aa, Artificial Sequence
  Description of Artificial Sequence: Synthetic polypeptide
DIQMTQSPSSLSASVGDRVTITCKASQDVGIAVAWYQQKPGKVPKLLIYWASTRHTGVPDRFSGSGSGTDFTLTISSLQPEDVATYYCQQYSSYPYTFGQGTKVEIKRTVAAPSVFIFPPSDEQLKSGTASVVCLLNNFYPREAKVQWKVDNALQSGNSQESVTEQDSKDSTYSLSSTLTLSKADYEKHKVYACEVTHQGLSSPVTKSFNRGECGGGGSGGGGSGGGGSPGWFLDSPDRPWNPPTFSPALLVVTEGDNATFTCSFSNTSESFVLNWYRMSPSNQTDKLAAFPEDRSQPGQDCRFRVTQLPNGRDFHMSVVRARRNDSGTYLCGAISLAPKAQIKESLRAELRVTERRAEVPTAHPSPSPRPAGQFQTLV

SEQ ID NO: 303 - protein, 759 aa, Artificial Sequence
  Description of Artificial Sequence: Synthetic polypeptide
DIQMTQSPSSLSASVGDRVTITCKASQDVGIAVAWYQQKPGKVPKLLIYWASTRHTGVPDRFSGSGSGTDFTLTISSLQPEDVATYYCQQYSSYPYTFGQGTKVEIKRTVAAPSVFIFPPSDEQLKSGTASVVCLLNNFYPREAKVQWKVDNALQSGNSQESVTEQDSKDSTYSLSSTLTLSKADYEKHKVYACEVTHQGLSSPVTKSFNRGECGGGGSGGGGSGGGGSMDGRFWIRVQESVMVPEGLCISVPCSFSYPRQDWTGSTPAYGYWFKAVTETTKGAPVATNHQSREVEMSTRGRFQLTGDPAKGNCSLVIRDAQMQDESQYFFRVERGSYVRYNFMNDGFFLKVTALTQKPDVYIPETLEPGQPVTVICVFNWAFEECPPPSFSWTGAALSSQGTKPTTSHFSVLSFTPRPQDHNTDLTCHVDFSRKGVSAQRTVRLRVAYAPRDLVISISRDNTPALEPQPQGNVPYLEAQKGQFLRLLCAADSQPPATLSWVLQNRVLSSSHPWGPRPLGLELPGVKAGDSGRYTCRAENRLGSQQRALDLSVQYPPENLRVMVSQANRTVLENLGNGTSLPVLEGQSLCLVCVTHSSPPARLSWTQRGQVLSPSQPSDPGVLELPRVQVEHEGEFTCHARHPLGSQHVSLSLSVHYSPKLLGPSCSWEAEGLHCSCSSQASPAPSLRWWLGEELLEGNSSQDSFEVTPSSAGPWANSSLSLHGGLSSGLRLRCEAWNVHGAQSGSILQLPDKKGLIST

SEQ ID NO: 304 - protein, 348 aa, Artificial Sequence
  Description of Artificial Sequence: Synthetic polypeptide
DIQMTQSPSSLSASVGDRVTITCKASQDVGIAVAWYQQKPGKVPKLLIYWASTRHTGVPDRFSGSGSGTDFTLTISSLQPEDVATYYCQQYSSYPYTFGQGTKVEIKRTVAAPSVFIFPPSDEQLKSGTASVVCLLNNFYPREAKVQWKVDNALQSGNSQESVTEQDSKDSTYSLSSTLTLSKADYEKHKVYACEVTHQGLSSPVTKSFNRGECGGGGSGGGGSGGGGSEEELQVIQPDKSVLVAAGETATLRCTATSLIPVGPIQWFRGAGPGRELIYNQKEGHFPRVTTVSDLTKRNNMDFSIRIGNITPADAGTYYCVKFRKGSPDDVEFKSGAGTELSVRAKPS

SEQ ID NO: 305 - protein, 410 aa, Artificial Sequence
  Description of Artificial Sequence: Synthetic polypeptide
DIQMTQSPSSLSASVGDRVTITCKASQDVGIAVAWYQQKPGKVPKLLIYWASTRHTGVPDRFSGSGSGTDFTLTISSLQPEDVATYYCQQYSSYPYTFGQGTKVEIKRTVAAPSVFIFPPSDEQLKSGTASVVCLLNNFYPREAKVQWKVDNALQSGNSQESVTEQDSKDSTYSLSSTLTLSKADYEKHKVYACEVTHQGLSSPVTKSFNRGECGGGGSGGGGSGGGGSSEVEYRAEVGQNAYLPCFYTPAAPGNLVPVCWGKGACPVFECGNVVLRTDERDVNYWTSRYWLNGDFRKGDVSLTIENVTLADSGIYCCRIQIPGIMNDEKFNLKLVIKPAKVTPAPTRQRDFTAAFPRMLTTRGHGPAETQTLGSLPDINLTQISTLANELRDSRLANDLRDSGATIRIG

SEQ ID NO: 306 - protein, 614 aa, Artificial Sequence
  Description of Artificial Sequence: Synthetic polypeptide
EVQLVESGGGLVQPGGSLRLSCAASGFDFSRYWMSWVRQAPGKGLEWIGEINPDSSTINYAPSLKDKFIISRDNAKNSLYLQMNSLRAEDTAVYYCARPDGNYWYFDVWGQGTLVTVSSASTKGPSVFPLAPSSKSTSGGTAALGCLVKDYFPEPVTVSWNSGALTSGVHTFPAVLQSSGLYSLSSVVTVPSSSLGTQTYICNVNHKPSNTKVDKKVEPKSCDKTHTCPPCPAPELLGGPSVFLFPPKPKDTLMISRTPEVTCVVVDVSHEDPEVKFNWYVDGVEVHNAKTKPREEQYNSTYRVVSVLTVLHQDWLNGKEYKCKVSNKALPAPIEKTISKAKGQPREPQVYTLPPSRDELTKNQVSLTCLVKGFYPSDIAVEWESNGQPENNYKTTPPVLDSDGSFFLYSKLTVDKSRWQQGNVFSCSVMHEALHNHYTQKSLSLSPGKGGGGSGGGGSGGGGSPGWFLDSPDRPWNPPTFSPALLVVTEGDNATFTCSFSNTSESFVLNWYRMSPSNQTDKLAAFPEDRSQPGQDCRFRVTQLPNGRDFHMSVVRARRNDSGTYLCGAISLAPKAQIKESLRAELRVTERRAEVPTAHPSPSPRPAGQFQTLV

SEQ ID NO: 307 - protein, 349 aa, Artificial Sequence
  Description of Artificial Sequence: Synthetic polypeptide
DIQMTQSPSSLSASVGDRVTITCKASQDVGIAVAWYQQKPGKVPKLLIYWASTRHTGVPDRFSGSGSGTDFTLTISSLQPEDVATYYCQQYSSYPYTFGQGTKVEIKRTVAAPSVFIFPPSDEQLKSGTASVVCLLNNFYPREAKVQWKVDNALQSGNSQESVTEQDSKDSTYSLSSTLTLSKADYEKHKVYACEVTHQGLSSPVTKSFNRGECGGGGSGGGGSGGGGSKESCDVQLYIKRQSEHSILAGDPFELECPVKYCANRPHVTWCKLNGTTCVKLEDRQTSWKEEKNISFFILHFEPVLPNDNGSYRCSANFQSNLIESHSTTLYVTDVKSASERPSKDEMAS

SEQ ID NO: 308 - protein, 994 aa, Artificial Sequence
  Description of Artificial Sequence: Synthetic polypeptide
EVQLVESGGGLVQPGGSLRLSCAASGFDFSRYWMSWVRQAPGKGLEWIGEINPDSSTINYAPSLKDKFIISRDNAKNSLYLQMNSLRAEDTAVYYCARPDGNYWYFDVWGQGTLVTVSSASTKGPSVFPLAPSSKSTSGGTAALGCLVKDYFPEPVTVSWNSGALTSGVHTFPAVLQSSGLYSLSSVVTVPSSSLGTQTYICNVNHKPSNTKVDKKVEPKSCDKTHTCPPCPAPELLGGPSVFLFPPKPKDTLMISRTPEVTCVVVDVSHEDPEVKFNWYVDGVEVHNAKTKPREEQYNSTYRVVSVLTVLHQDWLNGKEYKCKVSNKALPAPIEKTISKAKGQPREPQVYTLPPSRDELTKNQVSLTCLVKGFYPSDIAVEWESNGQPENNYKTTPPVLDSDGSFFLYSKLTVDKSRWQQGNVFSCSVMHEALHNHYTQKSLSLSPGKGGGGSGGGGSGGGGSMDGRFWIRVQESVMVPEGLCISVPCSFSYPRQDWTGSTPAYGYWFKAVTETTKGAPVATNHQSREVEMSTRGRFQLTGDPAKGNCSLVIRDAQMQDESQYFFRVERGSYVRYNFMNDGFFLKVTALTQKPDVYIPETLEPGQPVTVICVFNWAFEECPPPSFSWTGAALSSQGTKPTTSHFSVLSFTPRPQDHNTDLTCHVDFSRKGVSAQRTVRLRVAYAPRDLVISISRDNTPALEPQPQGNVPYLEAQKGQFLRLLCAADSQPPATLSWVLQNRVLSSSHPWGPRPLGLELPGVKAGDSGRYTCRAENRLGSQQRALDLSVQYPPENLRVMVSQANRTVLENLGNGTSLPVLEGQSLCLVCVTHSSPPARLSWTQRGQVLSPSQPSDPGVLELPRVQVEHEGEFTCHARHPLGSQHVSLSLSVHYSPKLLGPSCSWEAEGLHCSCSSQASPAPSLRWWLGEELLEGNSSQDSFEVTPSSAGPWANSSLSLHGGLSSGLRLRCEAWNVHGAQSGSILQLPDKKGLIST

SEQ ID NO: 309 - protein, 583 aa, Artificial Sequence
  Description of Artificial Sequence: Synthetic polypeptide
EVQLVESGGGLVQPGGSLRLSCAASGFDFSRYWMSWVRQAPGKGLEWIGEINPDSSTINYAPSLKDKFIISRDNAKNSLYLQMNSLRAEDTAVYYCARPDGNYWYFDVWGQGTLVTVSSASTKGPSVFPLAPSSKSTSGGTAALGCLVKDYFPEPVTVSWNSGALTSGVHTFPAVLQSSGLYSLSSVVTVPSSSLGTQTYICNVNHKPSNTKVDKKVEPKSCDKTHTCPPCPAPELLGGPSVFLFPPKPKDTLMISRTPEVTCVVVDVSHEDPEVKFNWYVDGVEVHNAKTKPREEQYNSTYRVVSVLTVLHQDWLNGKEYKCKVSNKALPAPIEKTISKAKGQPREPQVYTLPPSRDELTKNQVSLTCLVKGFYPSDIAVEWESNGQPENNYKTTPPVLDSDGSFFLYSKLTVDKSRWQQGNVFSCSVMHEALHNHYTQKSLSLSPGKGGGGSGGGGSGGGGSEEELQVIQPDKSVLVAAGETATLRCTATSLIPVGPIQWFRGAGPGRELIYNQKEGHFPRVTTVSDLTKRNNMDFSIRIGNITPADAGTYYCVKFRKGSPDDVEFKSGAGTELSVRAKPS

SEQ ID NO: 310 - protein, 601 aa, Artificial Sequence
  Description of Artificial Sequence: Synthetic polypeptide
EVQLVESGGGLVQPGGSLRLSCAASGFDFSRYWMSWVRQAPGKGLEWIGEINPDSSTINYAPSLKDKFIISRDNAKNSLYLQMNSLRAEDTAVYYCARPDGNYWYFDVWGQGTLVTVSSASTKGPSVFPLAPSSKSTSGGTAALGCLVKDYFPEPVTVSWNSGALTSGVHTFPAVLQSSGLYSLSSVVTVPSSSLGTQTYICNVNHKPSNTKVDKKVEPKSCDKTHTCPPCPAPELLGGPSVFLFPPKPKDTLMISRTPEVTCVVVDVSHEDPEVKFNWYVDGVEVHNAKTKPREEQYNSTYRVVSVLTVLHQDWLNGKEYKCKVSNKALPAPIEKTISKAKGQPREPQVYTLPPSRDELTKNQVSLTCLVKGFYPSDIAVEWESNGQPENNYKTTPPVLDSDGSFFLYSKLTVDKSRWQQGNVFSCSVMHEALHNHYTQKSLSLSPGKGGGGSGGGGSGGGGSTIPPHVQKSVNNDMIVTDNNGAVKFPQLCKFCDVRFSTCDNQKSCMSNCSITSICEKPQEVCVAVWRKNDENITLETVCHDPKLPYHDFILEDAASPKCIMKEKKKPGETFFMCSCSSDECNDNIIFSEEYNTSNPD

SEQ ID NO: 311 - protein, 645 aa, Artificial Sequence
  Description of Artificial Sequence: Synthetic polypeptide
EVQLVESGGGLVQPGGSLRLSCAASGFDFSRYWMSWVRQAPGKGLEWIGEINPDSSTINYAPSLKDKFIISRDNAKNSLYLQMNSLRAEDTAVYYCARPDGNYWYFDVWGQGTLVTVSSASTKGPSVFPLAPSSKSTSGGTAALGCLVKDYFPEPVTVSWNSGALTSGVHTFPAVLQSSGLYSLSSVVTVPSSSLGTQTYICNVNHKPSNTKVDKKVEPKSCDKTHTCPPCPAPELLGGPSVFLFPPKPKDTLMISRTPEVTCVVVDVSHEDPEVKFNWYVDGVEVHNAKTKPREEQYNSTYRVVSVLTVLHQDWLNGKEYKCKVSNKALPAPIEKTISKAKGQPREPQVYTLPPSRDELTKNQVSLTCLVKGFYPSDIAVEWESNGQPENNYKTTPPVLDSDGSFFLYSKLTVDKSRWQQGNVFSCSVMHEALHNHYTQKSLSLSPGKGGGGSGGGGSGGGGSSEVEYRAEVGQNAYLPCFYTPAAPGNLVPVCWGKGACPVFECGNVVLRTDERDVNYWTSRYWLNGDFRKGDVSLTIENVTLADSGIYCCRIQIPGIMNDEKFNLKLVIKPAKVTPAPTRQRDFTAAFPRMLTTRGHGPAETQTLGSLPDINLTQISTLANELRDSRLANDLRDSGATIRIG

SEQ ID NO: 312 - protein, 669 aa, Artificial Sequence
  Description of Artificial Sequence: Synthetic polypeptide
EVQLVESGGGLVQPGGSLRLSCAASGFDFSRYWMSWVRQAPGKGLEWIGEINPDSSTINYAPSLKDKFIISRDNAKNSLYLQMNSLRAEDTAVYYCARPDGNYWYFDVWGQGTLVTVSSASTKGPSVFPLAPSSKSTSGGTAALGCLVKDYFPEPVTVSWNSGALTSGVHTFPAVLQSSGLYSLSSVVTVPSSSLGTQTYICNVNHKPSNTKVDKKVEPKSCDKTHTCPPCPAPELLGGPSVFLFPPKPKDTLMISRTPEVTCVVVDVSHEDPEVKFNWYVDGVEVHNAKTKPREEQYNSTYRVVSVLTVLHQDWLNGKEYKCKVSNKALPAPIEKTISKAKGQPREPQVYTLPPSRDELTKNQVSLTCLVKGFYPSDIAVEWESNGQPENNYKTTPPVLDSDGSFFLYSKLTVDKSRWQQGNVFSCSVMHEALHNHYTQKSLSLSPGKGGGGSGGGGSGGGGSSDTGRPFVEMYSEIPEIIHMTEGRELVIPCRVTSPNITVTLKKFPLDTLIPDGKRIIWDSRKGFIISNATYKEIGLLTCEATVNGHLYKTNYLTHRQTNTIIDVVLSPSHGIELSVGEKLVLNCTARTELNVGIDFNWEYPSSKHQHKKLVNRDLKTQSGSEMKKFLSTLTIDGVTRSDQGLYTCAASSGLMTKKNSTFVRVHEK

SEQ ID NO: 313 - protein, 584 aa, Artificial Sequence
  Description of Artificial Sequence: Synthetic polypeptide
QVQLQESGPGLVRPSQTLSLTCTVSGYSITSDHAWSWVRQPPGRGLEWIGYISYSGITTYNPSLKSRVTMLRDTSKNQFSLRLSSVTAADTAVYYCARSLARTTAMDYWGQGSLVTVSSASTKGPSVFPLAPSSKSTSGGTAALGCLVKDYFPEPVTVSWNSGALTSGVHTFPAVLQSSGLYSLSSVVTVPSSSLGTQTYICNVNHKPSNTKVDKKVEPKSCDKTHTCPPCPAPELLGGPSVFLFPPKPKDTLMISRTPEVTCVVVDVSHEDPEVKFNWYVDGVEVHNAKTKPREEQYNSTYRVVSVLTVLHQDWLNGKEYKCKVSNKALPAPIEKTISKAKGQPREPQVYTLPPSRDELTKNQVSLTCLVKGFYPSDIAVEWESNGQPENNYKTTPPVLDSDGSFFLYSKLTVDKSRWQQGNVFSCSVMHEALHNHYTQKSLSLSPGKGGGGSGGGGSGGGGSKESCDVQLYIKRQSEHSILAGDPFELECPVKYCANRPHVTWCKLNGTTCVKLEDRQTSWKEEKNISFFILHFEPVLPNDNGSYRCSANFQSNLIESHSTTLYVTDVKSASERPSKDEMAS

SEQ ID NO: 314 - protein, 379 aa, Artificial Sequence
  Description of Artificial Sequence: Synthetic polypeptide
DIQMTQSPSSLSASVGDRVTITCRASQDISSYLNWYQQKPGKAPKLLIYYTSRLHSGVPSRFSGSGSGTDFTFTISSLQPEDIATYYCQQGNTLPYTFGQGTKVEIKRTVAAPSVFIFPPSDEQLKSGTASVVCLLNNFYPREAKVQWKVDNALQSGNSQESVTEQDSKDSTYSLSSTLTLSKADYEKHKVYACEVTHQGLSSPVTKSFNRGECGGGGSGGGGSGGGGSPGWFLDSPDRPWNPPTFSPALLVVTEGDNATFTCSFSNTSESFVLNWYRMSPSNQTDKLAAFPEDRSQPGQDCRFRVTQLPNGRDFHMSVVRARRNDSGTYLCGAISLAPKAQIKESLRAELRVTERRAEVPTAHPSPSPRPAGQFQTLV

SEQ ID NO: 315 - protein, 759 aa, Artificial Sequence
  Description of Artificial Sequence: Synthetic polypeptide
DIQMTQSPSSLSASVGDRVTITCRASQDISSYLNWYQQKPGKAPKLLIYYTSRLHSGVPSRFSGSGSGTDFTFTISSLQPEDIATYYCQQGNTLPYTFGQGTKVEIKRTVAAPSVFIFPPSDEQLKSGTASVVCLLNNFYPREAKVQWKVDNALQSGNSQESVTEQDSKDSTYSLSSTLTLSKADYEKHKVYACEVTHQGLSSPVTKSFNRGECGGGGSGGGGSGGGGSMDGRFWIRVQESVMVPEGLCISVPCSFSYPRQDWTGSTPAYGYWFKAVTETTKGAPVATNHQSREVEMSTRGRFQLTGDPAKGNCSLVIRDAQMQDESQYFFRVERGSYVRYNFMNDGFFLKVTALTQKPDVYIPETLEPGQPVTVICVFNWAFEECPPPSFSWTGAALSSQGTKPTTSHFSVLSFTPRPQDHNTDLTCHVDFSRKGVSAQRTVRLRVAYAPRDLVISISRDNTPALEPQPQGNVPYLEAQKGQFLRLLCAADSQPPATLSWVLQNRVLSSSHPWGPRPLGLELPGVKAGDSGRYTCRAENRLGSQQRALDLSVQYPPENLRVMVSQANRTVLENLGNGTSLPVLEGQSLCLVCVTHSSPPARLSWTQRGQVLSPSQPSDPGVLELPRVQVEHEGEFTCHARHPLGSQHVSLSLSVHYSPKLLGPSCSWEAEGLHCSCSSQASPAPSLRWWLGEELLEGNSSQDSFEVTPSSAGPWANSSLSLHGGLSSGLRLRCEAWNVHGAQSGSILQLPDKKGLIST

SEQ ID NO: 316 - protein, 348 aa, Artificial Sequence
  Description of Artificial Sequence: Synthetic polypeptide
DIQMTQSPSSLSASVGDRVTITCRASQDISSYLNWYQQKPGKAPKLLIYYTSRLHSGVPSRFSGSGSGTDFTFTISSLQPEDIATYYCQQGNTLPYTFGQGTKVEIKRTVAAPSVFIFPPSDEQLKSGTASVVCLLNNFYPREAKVQWKVDNALQSGNSQESVTEQDSKDSTYSLSSTLTLSKADYEKHKVYACEVTHQGLSSPVTKSFNRGECGGGGSGGGGSGGGGSEEELQVIQPDKSVLVAAGETATLRCTATSLIPVGPIQWFRGAGPGRELIYNQKEGHFPRVTTVSDLTKRNNMDFSIRIGNITPADAGTYYCVKFRKGSPDDVEFKSGAGTELSVRAKPS

SEQ ID NO: 317 - protein, 410 aa, Artificial Sequence
  Description of Artificial Sequence: Synthetic polypeptide
DIQMTQSPSSLSASVGDRVTITCRASQDISSYLNWYQQKPGKAPKLLIYYTSRLHSGVPSRFSGSGSGTDFTFTISSLQPEDIATYYCQQGNTLPYTFGQGTKVEIKRTVAAPSVFIFPPSDEQLKSGTASVVCLLNNFYPREAKVQWKVDNALQSGNSQESVTEQDSKDSTYSLSSTLTLSKADYEKHKVYACEVTHQGLSSPVTKSFNRGECGGGGSGGGGSGGGGSSEVEYRAEVGQNAYLPCFYTPAAPGNLVPVCWGKGACPVFECGNVVLRTDERDVNYWTSRYWLNGDFRKGDVSLTIENVTLADSGIYCCRIQIPGIMNDEKFNLKLVIKPAKVTPAPTRQRDFTAAFPRMLTTRGHGPAETQTLGSLPDINLTQISTLANELRDSRLANDLRDSGATIRIG

SEQ ID NO: 318 - protein, 614 aa, Artificial Sequence
  Description of Artificial Sequence: Synthetic polypeptide
QVQLQESGPGLVRPSQTLSLTCTVSGYSITSDHAWSWVRQPPGRGLEWIGYISYSGITTYNPSLKSRVTMLRDTSKNQFSLRLSSVTAADTAVYYCARSLARTTAMDYWGQGSLVTVSSASTKGPSVFPLAPSSKSTSGGTAALGCLVKDYFPEPVTVSWNSGALTSGVHTFPAVLQSSGLYSLSSVVTVPSSSLGTQTYICNVNHKPSNTKVDKKVEPKSCDKTHTCPPCPAPELLGGPSVFLFPPKPKDTLMISRTPEVTCVVVDVSHEDPEVKFNWYVDGVEVHNAKTKPREEQYNSTYRVVSVLTVLHQDWLNGKEYKCKVSNKALPAPIEKTISKAKGQPREPQVYTLPPSRDELTKNQVSLTCLVKGFYPSDIAVEWESNGQPENNYKTTPPVLDSDGSFFLYSKLTVDKSRWQQGNVFSCSVMHEALHNHYTQKSLSLSPGKGGGGSGGGGSGGGGSPGWFLDSPDRPWNPPTFSPALLVVTEGDNATFTCSFSNTSESFVLNWYRMSPSNQTDKLAAFPEDRSQPGQDCRFRVTQLPNGRDFHMSVVRARRNDSGTYLCGAISLAPKAQIKESLRAELRVTERRAEVPTAHPSPSPRPAGQFQTLV

SEQ ID NO: 319 - protein, 349 aa, Artificial Sequence
  Description of Artificial Sequence: Synthetic polypeptide
DIQMTQSPSSLSASVGDRVTITCRASQDISSYLNWYQQKPGKAPKLLIYYTSRLHSGVPSRFSGSGSGTDFTFTISSLQPEDIATYYCQQGNTLPYTFGQGTKVEIKRTVAAPSVFIFPPSDEQLKSGTASVVCLLNNFYPREAKVQWKVDNALQSGNSQESVTEQDSKDSTYSLSSTLTLSKADYEKHKVYACEVTHQGLSSPVTKSFNRGECGGGGSGGGGSGGGGSKESCDVQLYIKRQSEHSILAGDPFELECPVKYCANRPHVTWCKLNGTTCVKLEDRQTSWKEEKNISFFILHFEPVLPNDNGSYRCSANFQSNLIESHSTTLYVTDVKSASERPSKDEMAS

SEQ ID NO: 320 - protein, 994 aa, Artificial Sequence
  Description of Artificial Sequence: Synthetic polypeptide
QVQLQESGPGLVRPSQTLSLTCTVSGYSITSDHAWSWVRQPPGRGLEWIGYISYSGITTYNPSLKSRVTMLRDTSKNQFSLRLSSVTAADTAVYYCARSLARTTAMDYWGQGSLVTVSSASTKGPSVFPLAPSSKSTSGGTAALGCLVKDYFPEPVTVSWNSGALTSGVHTFPAVLQSSGLYSLSSVVTVPSSSLGTQTYICNVNHKPSNTKVDKKVEPKSCDKTHTCPPCPAPELLGGPSVFLFPPKPKDTLMISRTPEVTCVVVDVSHEDPEVKFNWYVDGVEVHNAKTKPREEQYNSTYRVVSVLTVLHQDWLNGKEYKCKVSNKALPAPIEKTISKAKGQPREPQVYTLPPSRDELTKNQVSLTCLVKGFYPSDIAVEWESNGQPENNYKTTPPVLDSDGSFFLYSKLTVDKSRWQQGNVFSCSVMHEALHNHYTQKSLSLSPGKGGGGSGGGGSGGGGSMDGRFWIRVQESVMVPEGLCISVPCSFSYPRQDWTGSTPAYGYWFKAVTETTKGAPVATNHQSREVEMSTRGRFQLTGDPAKGNCSLVIRDAQMQDESQYFFRVERGSYVRYNFMNDGFFLKVTALTQKPDVYIPETLEPGQPVTVICVFNWAFEECPPPSFSWTGAALSSQGTKPTTSHFSVLSFTPRPQDHNTDLTCHVDFSRKGVSAQRTVRLRVAYAPRDLVISISRDNTPALEPQPQGNVPYLEAQKGQFLRLLCAADSQPPATLSWVLQNRVLSSSHPWGPRPLGLELPGVKAGDSGRYTCRAENRLGSQQRALDLSVQYPPENLRVMVSQANRTVLENLGNGTSLPVLEGQSLCLVCVTHSSPPARLSWTQRGQVLSPSQPSDPGVLELPRVQVEHEGEFTCHARHPLGSQHVSLSLSVHYSPKLLGPSCSWEAEGLHCSCSSQASPAPSLRWWLGEELLEGNSSQDSFEVTPSSAGPWANSSLSLHGGLSSGLRLRCEAWNVHGAQSGSILQLPDKKGLIST

SEQ ID NO: 321 - protein, 583 aa, Artificial Sequence
  Description of Artificial Sequence: Synthetic polypeptide
QVQLQESGPGLVRPSQTLSLTCTVSGYSITSDHAWSWVRQPPGRGLEWIGYISYSGITTYNPSLKSRVTMLRDTSKNQFSLRLSSVTAADTAVYYCARSLARTTAMDYWGQGSLVTVSSASTKGPSVFPLAPSSKSTSGGTAALGCLVKDYFPEPVTVSWNSGALTSGVHTFPAVLQSSGLYSLSSVVTVPSSSLGTQTYICNVNHKPSNTKVDKKVEPKSCDKTHTCPPCPAPELLGGPSVFLFPPKPKDTLMISRTPEVTCVVVDVSHEDPEVKFNWYVDGVEVHNAKTKPREEQYNSTYRVVSVLTVLHQDWLNGKEYKCKVSNKALPAPIEKTISKAKGQPREPQVYTLPPSRDELTKNQVSLTCLVKGFYPSDIAVEWESNGQPENNYKTTPPVLDSDGSFFLYSKLTVDKSRWQQGNVFSCSVMHEALHNHYTQKSLSLSPGKGGGGSGGGGSGGGGSEEELQVIQPDKSVLVAAGETATLRCTATSLIPVGPIQWFRGAGPGRELIYNQKEGHFPRVTTVSDLTKRNNMDFSIRIGNITPADAGTYYCVKFRKGSPDDVEFKSGAGTELSVRAKPS

SEQ ID NO: 322 - protein, 601 aa, Artificial Sequence
  Description of Artificial Sequence: Synthetic polypeptide
QVQLQESGPGLVRPSQTLSLTCTVSGYSITSDHAWSWVRQPPGRGLEWIGYISYSGITTYNPSLKSRVTMLRDTSKNQFSLRLSSVTAADTAVYYCARSLARTTAMDYWGQGSLVTVSSASTKGPSVFPLAPSSKSTSGGTAALGCLVKDYFPEPVTVSWNSGALTSGVHTFPAVLQSSGLYSLSSVVTVPSSSLGTQTYICNVNHKPSNTKVDKKVEPKSCDKTHTCPPCPAPELLGGPSVFLFPPKPKDTLMISRTPEVTCVVVDVSHEDPEVKFNWYVDGVEVHNAKTKPREEQYNSTYRVVSVLTVLHQDWLNGKEYKCKVSNKALPAPIEKTISKAKGQPREPQVYTLPPSRDELTKNQVSLTCLVKGFYPSDIAVEWESNGQPENNYKTTPPVLDSDGSFFLYSKLTVDKSRWQQGNVFSCSVMHEALHNHYTQKSLSLSPGKGGGGSGGGGSGGGGSTIPPHVQKSVNNDMIVTDNNGAVKFPQLCKFCDVRFSTCDNQKSCMSNCSITSICEKPQEVCVAVWRKNDENITLETVCHDPKLPYHDFILEDAASPKCIMKEKKKPGETFFMCSCSSDECNDNIIFSEEYNTSNPD

SEQ ID NO: 323 - protein, 645 aa, Artificial Sequence
  Description of Artificial Sequence: Synthetic polypeptide
QVQLQESGPGLVRPSQTLSLTCTVSGYSITSDHAWSWVRQPPGRGLEWIGYISYSGITTYNPSLKSRVTMLRDTSKNQFSLRLSSVTAADTAVYYCARSLARTTAMDYWGQGSLVTVSSASTKGPSVFPLAPSSKSTSGGTAALGCLVKDYFPEPVTVSWNSGALTSGVHTFPAVLQSSGLYSLSSVVTVPSSSLGTQTYICNVNHKPSNTKVDKKVEPKSCDKTHTCPPCPAPELLGGPSVFLFPPKPKDTLMISRTPEVTCVVVDVSHEDPEVKFNWYVDGVEVHNAKTKPREEQYNSTYRVVSVLTVLHQDWLNGKEYKCKVSNKALPAPIEKTISKAKGQPREPQVYTLPPSRDELTKNQVSLTCLVKGFYPSDIAVEWESNGQPENNYKTTPPVLDSDGSFFLYSKLTVDKSRWQQGNVFSCSVMHEALHNHYTQKSLSLSPGKGGGGSGGGGSGGGGSSEVEYRAEVGQNAYLPCFYTPAAPGNLVPVCWGKGACPVFECGNVVLRTDERDVNYWTSRYWLNGDFRKGDVSLTIENVTLADSGIYCCRIQIPGIMNDEKFNLKLVIKPAKVTPAPTRQRDFTAAFPRMLTTRGHGPAETQTLGSLPDINLTQISTLANELRDSRLANDLRDSGATIRIG

SEQ ID NO: 324 - protein, 669 aa, Artificial Sequence
  Description of Artificial Sequence: Synthetic polypeptide
QVQLQESGPGLVRPSQTLSLTCTVSGYSITSDHAWSWVRQPPGRGLEWIGYISYSGITTYNPSLKSRVTMLRDTSKNQFSLRLSSVTAADTAVYYCARSLARTTAMDYWGQGSLVTVSSASTKGPSVFPLAPSSKSTSGGTAALGCLVKDYFPEPVTVSWNSGALTSGVHTFPAVLQSSGLYSLSSVVTVPSSSLGTQTYICNVNHKPSNTKVDKKVEPKSCDKTHTCPPCPAPELLGGPSVFLFPPKPKDTLMISRTPEVTCVVVDVSHEDPEVKFNWYVDGVEVHNAKTKPREEQYNSTYRVVSVLTVLHQDWLNGKEYKCKVSNKALPAPIEKTISKAKGQPREPQVYTLPPSRDELTKNQVSLTCLVKGFYPSDIAVEWESNGQPENNYKTTPPVLDSDGSFFLYSKLTVDKSRWQQGNVFSCSVMHEALHNHYTQKSLSLSPGKGGGGSGGGGSGGGGSSDTGRPFVEMYSEIPEIIHMTEGRELVIPCRVTSPNITVTLKKFPLDTLIPDGKRIIWDSRKGFIISNATYKEIGLLTCEATVNGHLYKTNYLTHRQTNTIIDVVLSPSHGIELSVGEKLVLNCTARTELNVGIDFNWEYPSSKHQHKKLVNRDLKTQSGSEMKKFLSTLTIDGVTRSDQGLYTCAASSGLMTKKNSTFVRVHEK

SEQ ID NO: 325 - protein, 577 aa, Artificial Sequence
  Description of Artificial Sequence: Synthetic polypeptide
QVQLVQSGAEVKKPGASVKVSCKASGYTFTRYGISWVRQAPGQGLEWMGWISTYSGNTNYAQKLQGRVTMTTDTSTSTAYMELRSLRSDDTAVYYCARRQLYFDYWGQGTLVTVSSASTKGPSVFPLAPCSRSTSESTAALGCLVKDYFPEPVTVSWNSGALTSGVHTFPAVLQSSGLYSLSSVVTVPSSNFGTQTYTCNVDHKPSNTKVDKTVERKCCVECPPCPAPPVAGPSVFLFPPKPKDTLMISRTPEVTCVVVDVSHEDPEVQFNWYVDGVEVHNAKTKPREEQFNSTFRVVSVLTVVHQDWLNGKEYKCKVSNKGLPAPIEKTISKTKGQPREPQVYTLPPSREEMTKNQVSLTCLVKGFYPSDIAVEWESNGQPENNYKTTPPMLDSDGSFFLYSKLTVDKSRWQQGNVFSCSVMHEALHNHYTQKSLSLSPGKGGGGSGGGGSGGGGSKESCDVQLYIKRQSEHSILAGDPFELECPVKYCANRPHVTWCKLNGTTCVKLEDRQTSWKEEKNISFFILHFEPVLPNDNGSYRCSANFQSNLIESHSTTLYVTDVKSASERPSKDEMAS

SEQ ID NO: 326 - protein, 379 aa, Artificial Sequence
  Description of Artificial Sequence: Synthetic polypeptide
EIVMTQSPATLSVSPGERATLSCRASQSVSSNLAWFQQKPGQAPRPLIYDASTRATGVPARFSGSGSGTDFTLTISSLQSEDFAVYYCQQYDNWPLTFGGGTKVEIKRTVAAPSVFIFPPSDEQLKSGTASVVCLLNNFYPREAKVQWKVDNALQSGNSQESVTEQDSKDSTYSLSSTLTLSKADYEKHKVYACEVTHQGLSSPVTKSFNRGECGGGGSGGGGSGGGGSPGWFLDSPDRPWNPPTFSPALLVVTEGDNATFTCSFSNTSESFVLNWYRMSPSNQTDKLAAFPEDRSQPGQDCRFRVTQLPNGRDFHMSVVRARRNDSGTYLCGAISLAPKAQIKESLRAELRVTERRAEVPTAHPSPSPRPAGQFQTLV

SEQ ID NO: 327 - protein, 759 aa, Artificial Sequence
  Description of Artificial Sequence: Synthetic polypeptide
EIVMTQSPATLSVSPGERATLSCRASQSVSSNLAWFQQKPGQAPRPLIYDASTRATGVPARFSGSGSGTDFTLTISSLQSEDFAVYYCQQYDNWPLTFGGGTKVEIKRTVAAPSVFIFPPSDEQLKSGTASVVCLLNNFYPREAKVQWKVDNALQSGNSQESVTEQDSKDSTYSLSSTLTLSKADYEKHKVYACEVTHQGLSSPVTKSFNRGECGGGGSGGGGSGGGGSMDGRFWIRVQESVMVPEGLCISVPCSFSYPRQDWTGSTPAYGYWFKAVTETTKGAPVATNHQSREVEMSTRGRFQLTGDPAKGNCSLVIRDAQMQDESQYFFRVERGSYVRYNFMNDGFFLKVTALTQKPDVYIPETLEPGQPVTVICVFNWAFEECPPPSFSWTGAALSSQGTKPTTSHFSVLSFTPRPQDHNTDLTCHVDFSRKGVSAQRTVRLRVAYAPRDLVISISRDNTPALEPQPQGNVPYLEAQKGQFLRLLCAADSQPPATLSWVLQNRVLSSSHPWGPRPLGLELPGVKAGDSGRYTCRAENRLGSQQRALDLSVQYPPENLRVMVSQANRTVLENLGNGTSLPVLEGQSLCLVCVTHSSPPARLSWTQRGQVLSPSQPSDPGVLELPRVQVEHEGEFTCHARHPLGSQHVSLSLSVHYSPKLLGPSCSWEAEGLHCSCSSQASPAPSLRWWLGEELLEGNSSQDSFEVTPSSAGPWANSSLSLHGGLSSGLRLRCEAWNVHGAQSGSILQLPDKKGLIST

SEQ ID NO: 328 - protein, 348 aa, Artificial Sequence
  Description of Artificial Sequence: Synthetic polypeptide
EIVMTQSPATLSVSPGERATLSCRASQSVSSNLAWFQQKPGQAPRPLIYDASTRATGVPARFSGSGSGTDFTLTISSLQSEDFAVYYCQQYDNWPLTFGGGTKVEIKRTVAAPSVFIFPPSDEQLKSGTASVVCLLNNFYPREAKVQWKVDNALQSGNSQESVTEQDSKDSTYSLSSTLTLSKADYEKHKVYACEVTHQGLSSPVTKSFNRGECGGGGSGGGGSGGGGSEEELQVIQPDKSVLVAAGETATLRCTATSLIPVGPIQWFRGAGPGRELIYNQKEGHFPRVTTVSDLTKRNNMDFSIRIGNITPADAGTYYCVKFRKGSPDDVEFKSGAGTELSVRAKPS

SEQ ID NO: 329 - protein, 410 aa, Artificial Sequence
  Description of Artificial Sequence: Synthetic polypeptide
EIVMTQSPATLSVSPGERATLSCRASQSVSSNLAWFQQKPGQAPRPLIYDASTRATGVPARFSGSGSGTDFTLTISSLQSEDFAVYYCQQYDNWPLTFGGGTKVEIKRTVAAPSVFIFPPSDEQLKSGTASVVCLLNNFYPREAKVQWKVDNALQSGNSQESVTEQDSKDSTYSLSSTLTLSKADYEKHKVYACEVTHQGLSSPVTKSFNRGECGGGGSGGGGSGGGGSSEVEYRAEVGQNAYLPCFYTPAAPGNLVPVCWGKGACPVFECGNVVLRTDERDVNYWTSRYWLNGDFRKGDVSLTIENVTLADSGIYCCRIQIPGIMNDEKFNLKLVIKPAKVTPAPTRQRDFTAAFPRMLTTRGHGPAETQTLGSLPDINLTQISTLANELRDSRLANDLRDSGATIRIG

SEQ ID NO: 330 - protein, 607 aa, Artificial Sequence
  Description of Artificial Sequence: Synthetic polypeptide
QVQLVQSGAEVKKPGASVKVSCKASGYTFTRYGISWVRQAPGQGLEWMGWISTYSGNTNYAQKLQGRVTMTTDTSTSTAYMELRSLRSDDTAVYYCARRQLYFDYWGQGTLVTVSSASTKGPSVFPLAPCSRSTSESTAALGCLVKDYFPEPVTVSWNSGALTSGVHTFPAVLQSSGLYSLSSVVTVPSSNFGTQTYTCNVDHKPSNTKVDKTVERKCCVECPPCPAPPVAGPSVFLFPPKPKDTLMISRTPEVTCVVVDVSHEDPEVQFNWYVDGVEVHNAKTKPREEQFNSTFRVVSVLTVVHQDWLNGKEYKCKVSNKGLPAPIEKTISKTKGQPREPQVYTLPPSREEMTKNQVSLTCLVKGFYPSDIAVEWESNGQPENNYKTTPPMLDSDGSFFLYSKLTVDKSRWQQGNVFSCSVMHEALHNHYTQKSLSLSPGKGGGGSGGGGSGGGGSPGWFLDSPDRPWNPPTFSPALLVVTEGDNATFTCSFSNTSESFVLNWYRMSPSNQTDKLAAFPEDRSQPGQDCRFRVTQLPNGRDFHMSVVRARRNDSGTYLCGAISLAPKAQIKESLRAELRVTERRAEVPTAHPSPSPRPAGQFQTLV

SEQ ID NO: 331 - protein, 349 aa, Artificial Sequence
  Description of Artificial Sequence: Synthetic polypeptide
EIVMTQSPATLSVSPGERATLSCRASQSVSSNLAWFQQKPGQAPRPLIYDASTRATGVPARFSGSGSGTDFTLTISSLQSEDFAVYYCQQYDNWPLTFGGGTKVEIKRTVAAPSVFIFPPSDEQLKSGTASVVCLLNNFYPREAKVQWKVDNALQSGNSQESVTEQDSKDSTYSLSSTLTLSKADYEKHKVYACEVTHQGLSSPVTKSFNRGECGGGGSGGGGSGGGGSKESCDVQLYIKRQSEHSILAGDPFELECPVKYCANRPHVTWCKLNGTTCVKLEDRQTSWKEEKNISFFILHFEPVLPNDNGSYRCSANFQSNLIESHSTTLYVTDVKSASERPSKDEMAS

SEQ ID NO: 332 - protein, 987 aa, Artificial Sequence
  Description of Artificial Sequence: Synthetic polypeptide
QVQLVQSGAEVKKPGASVKVSCKASGYTFTRYGISWVRQAPGQGLEWMGWISTYSGNTNYAQKLQGRVTMTTDTSTSTAYMELRSLRSDDTAVYYCARRQLYFDYWGQGTLVTVSSASTKGPSVFPLAPCSRSTSESTAALGCLVKDYFPEPVTVSWNSGALTSGVHTFPAVLQSSGLYSLSSVVTVPSSNFGTQTYTCNVDHKPSNTKVDKTVERKCCVECPPCPAPPVAGPSVFLFPPKPKDTLMISRTPEVTCVVVDVSHEDPEVQFNWYVDGVEVHNAKTKPREEQFNSTFRVVSVLTVVHQDWLNGKEYKCKVSNKGLPAPIEKTISKTKGQPREPQVYTLPPSREEMTKNQVSLTCLVKGFYPSDIAVEWESNGQPENNYKTTPPMLDSDGSFFLYSKLTVDKSRWQQGNVFSCSVMHEALHNHYTQKSLSLSPGKGGGGSGGGGSGGGGSMDGRFWIRVQESVMVPEGLCISVPCSFSYPRQDWTGSTPAYGYWFKAVTETTKGAPVATNHQSREVEMSTRGRFQLTGDPAKGNCSLVIRDAQMQDESQYFFRVERGSYVRYNFMNDGFFLKVTALTQKPDVYIPETLEPGQPVTVICVFNWAFEECPPPSFSWTGAALSSQGTKPTTSHFSVLSFTPRPQDHNTDLTCHVDFSRKGVSAQRTVRLRVAYAPRDLVISISRDNTPALEPQPQGNVPYLEAQKGQFLRLLCAADSQPPATLSWVLQNRVLSSSHPWGPRPLGLELPGVKAGDSGRYTCRAENRLGSQQRALDLSVQYPPENLRVMVSQANRTVLENLGNGTSLPVLEGQSLCLVCVTHSSPPARLSWTQRGQVLSPSQPSDPGVLELPRVQVEHEGEFTCHARHPLGSQHVSLSLSVHYSPKLLGPSCSWEAEGLHCSCSSQASPAPSLRWWLGEELLEGNSSQDSFEVTPSSAGPWANSSLSLHGGLSSGLRLRCEAWNVHGAQSGSILQLPDKKGLIST

SEQ ID NO: 333 - protein, 576 aa, Artificial Sequence
  Description of Artificial Sequence: Synthetic polypeptide
QVQLVQSGAEVKKPGASVKVSCKASGYTFTRYGISWVRQAPGQGLEWMGWISTYSGNTNYAQKLQGRVTMTTDTSTSTAYMELRSLRSDDTAVYYCARRQLYFDYWGQGTLVTVSSASTKGPSVFPLAPCSRSTSESTAALGCLVKDYFPEPVTVSWNSGALTSGVHTFPAVLQSSGLYSLSSVVTVPSSNFGTQTYTCNVDHKPSNTKVDKTVERKCCVECPPCPAPPVAGPSVFLFPPKPKDTLMISRTPEVTCVVVDVSHEDPEVQFNWYVDGVEVHNAKTKPREEQFNSTFRVVSVLTVVHQDWLNGKEYKCKVSNKGLPAPIEKTISKTKGQPREPQVYTLPPSREEMTKNQVSLTCLVKGFYPSDIAVEWESNGQPENNYKTTPPMLDSDGSFFLYSKLTVDKSRWQQGNVFSCSVMHEALHNHYTQKSLSLSPGKGGGGSGGGGSGGGGSEEELQVIQPDKSVLVAAGETATLRCTATSLIPVGPIQWFRGAGPGRELIYNQKEGHFPRVTTVSDLTKRNNMDFSIRIGNITPADAGTYYCVKFRKGSPDDVEFKSGAGTELSVRAKPS

SEQ ID NO: 334 - protein, 594 aa, Artificial Sequence
  Description of Artificial Sequence: Synthetic polypeptide
QVQLVQSGAEVKKPGASVKVSCKASGYTFTRYGISWVRQAPGQGLEWMGWISTYSGNTNYAQKLQGRVTMTTDTSTSTAYMELRSLRSDDTAVYYCARRQLYFDYWGQGTLVTVSSASTKGPSVFPLAPCSRSTSESTAALGCLVKDYFPEPVTVSWNSGALTSGVHTFPAVLQSSGLYSLSSVVTVPSSNFGTQTYTCNVDHKPSNTKVDKTVERKCCVECPPCPAPPVAGPSVFLFPPKPKDTLMISRTPEVTCVVVDVSHEDPEVQFNWYVDGVEVHNAKTKPREEQFNSTFRVVSVLTVVHQDWLNGKEYKCKVSNKGLPAPIEKTISKTKGQPREPQVYTLPPSREEMTKNQVSLTCLVKGFYPSDIAVEWESNGQPENNYKTTPPMLDSDGSFFLYSKLTVDKSRWQQGNVFSCSVMHEALHNHYTQKSLSLSPGKGGGGSGGGGSGGGGSTIPPHVQKSVNNDMIVTDNNGAVKFPQLCKFCDVRFSTCDNQKSCMSNCSITSICEKPQEVCVAVWRKNDENITLETVCHDPKLPYHDFILEDAASPKCIMKEKKKPGETFFMCSCSSDECNDNIIFSEEYNTSNPD

SEQ ID NO: 335 - protein, 638 aa, Artificial Sequence
  Description of Artificial Sequence: Synthetic polypeptide
QVQLVQSGAEVKKPGASVKVSCKASGYTFTRYGISWVRQAPGQGLEWMGWISTYSGNTNYAQKLQGRVTMTTDTSTSTAYMELRSLRSDDTAVYYCARRQLYFDYWGQGTLVTVSSASTKGPSVFPLAPCSRSTSESTAALGCLVKDYFPEPVTVSWNSGALTSGVHTFPAVLQSSGLYSLSSVVTVPSSNFGTQTYTCNVDHKPSNTKVDKTVERKCCVECPPCPAPPVAGPSVFLFPPKPKDTLMISRTPEVTCVVVDVSHEDPEVQFNWYVDGVEVHNAKTKPREEQFNSTFRVVSVLTVVHQDWLNGKEYKCKVSNKGLPAPIEKTISKTKGQPREPQVYTLPPSREEMTKNQVSLTCLVKGFYPSDIAVEWESNGQPENNYKTTPPMLDSDGSFFLYSKLTVDKSRWQQGNVFSCSVMHEALHNHYTQKSLSLSPGKGGGGSGGGGSGGGGSSEVEYRAEVGQNAYLPCFYTPAAPGNLVPVCWGKGACPVFECGNVVLRTDERDVNYWTSRYWLNGDFRKGDVSLTIENVTLADSGIYCCRIQIPGIMNDEKFNLKLVIKPAKVTPAPTRQRDFTAAFPRMLTTRGHGPAETQTLGSLPDINLTQISTLANELRDSRLANDLRDSGATIRIG

SEQ ID NO: 336 - protein, 662 aa, Artificial Sequence
  Description of Artificial Sequence: Synthetic polypeptide
QVQLVQSGAEVKKPGASVKVSCKASGYTFTRYGISWVRQAPGQGLEWMGWISTYSGNTNYAQKLQGRVTMTTDTSTSTAYMELRSLRSDDTAVYYCARRQLYFDYWGQGTLVTVSSASTKGPSVFPLAPCSRSTSESTAALGCLVKDYFPEPVTVSWNSGALTSGVHTFPAVLQSSGLYSLSSVVTVPSSNFGTQTYTCNVDHKPSNTKVDKTVERKCCVECPPCPAPPVAGPSVFLFPPKPKDTLMISRTPEVTCVVVDVSHEDPEVQFNWYVDGVEVHNAKTKPREEQFNSTFRVVSVLTVVHQDWLNGKEYKCKVSNKGLPAPIEKTISKTKGQPREPQVYTLPPSREEMTKNQVSLTCLVKGFYPSDIAVEWESNGQPENNYKTTPPMLDSDGSFFLYSKLTVDKSRWQQGNVFSCSVMHEALHNHYTQKSLSLSPGKGGGGSGGGGSGGGGSSDTGRPFVEMYSEIPEIIHMTEGRELVIPCRVTSPNITVTLKKFPLDTLIPDGKRIIWDSRKGFIISNATYKEIGLLTCEATVNGHLYKTNYLTHRQTNTIIDVVLSPSHGIELSVGEKLVLNCTARTELNVGIDFNWEYPSSKHQHKKLVNRDLKTQSGSEMKKFLSTLTIDGVTRSDQGLYTCAASSGLMTKKNSTFVRVHEK

SEQ ID NO: 337 - protein, 584 aa, Artificial Sequence
  Description of Artificial Sequence: Synthetic polypeptide
QVQLVQSGAEVKKPGSSVKVSCKASGYTFTDQTIHWMRQAPGQGLEWIGYIYPRDDSPKYNENFKGKVTITADKSTSTAYMELSSLRSEDTAVYYCAIPDRSGYAWFIYWGQGTLVTVSSASTKGPSVFPLAPSSKSTSGGTAALGCLVKDYFPEPVTVSWNSGALTSGVHTFPAVLQSSGLYSLSSVVTVPSSSLGTQTYICNVNHKPSNTKVDKRVEPKSCDKTHTCPPCPAPEAAGGPSVFLFPPKPKDTLMISRTPEVTCVVVDVSHEDPEVKFNWYVDGVEVHNAKTKPREEQYNSTYRVVSVLTVLHQDWLNGKEYKCKVSNKALPAPIEKTISKAKGQPREPQVYTLPPSREEMTKNQVSLTCLVKGFYPSDIAVEWESNGQPENNYKTTPPVLDSDGSFFLYSKLTVDKSRWQQGNVFSCSVMHEALHNHYTQKSLSLSPGGGGGSGGGGSGGGGSKESCDVQLYIKRQSEHSILAGDPFELECPVKYCANRPHVTWCKLNGTTCVKLEDRQTSWKEEKNISFFILHFEPVLPNDNGSYRCSANFQSNLIESHSTTLYVTDVKSASERPSKDEMAS

SEQ ID NO: 338 - protein, 379 aa, Artificial Sequence
  Description of Artificial Sequence: Synthetic polypeptide
DIQMTQSPSSLSASVGDRVTITCKASRDVAIAVAWYQQKPGKVPKLLIYWASTRHTGVPSRFSGSGSRTDFTLTISSLQPEDVADYFCHQYSSYPFTFGSGTKLEIKRTVAAPSVFIFPPSDEQLKSGTASVVCLLNNFYPREAKVQWKVDNALQSGNSQESVTEQDSKDSTYSLSSTLTLSKADYEKHKVYACEVTHQGLSSPVTKSFNRGECGGGGSGGGGSGGGGSPGWFLDSPDRPWNPPTFSPALLVVTEGDNATFTCSFSNTSESFVLNWYRMSPSNQTDKLAAFPEDRSQPGQDCRFRVTQLPNGRDFHMSVVRARRNDSGTYLCGAISLAPKAQIKESLRAELRVTERRAEVPTAHPSPSPRPAGQFQTLV

SEQ ID NO: 339 - protein, 759 aa, Artificial Sequence
  Description of Artificial Sequence: Synthetic polypeptide
DIQMTQSPSSLSASVGDRVTITCKASRDVAIAVAWYQQKPGKVPKLLIYWASTRHTGVPSRFSGSGSRTDFTLTISSLQPEDVADYFCHQYSSYPFTFGSGTKLEIKRTVAAPSVFIFPPSDEQLKSGTASVVCLLNNFYPREAKVQWKVDNALQSGNSQESVTEQDSKDSTYSLSSTLTLSKADYEKHKVYACEVTHQGLSSPVTKSFNRGECGGGGSGGGGSGGGGSMDGRFWIRVQESVMVPEGLCISVPCSFSYPRQDWTGSTPAYGYWFKAVTETTKGAPVATNHQSREVEMSTRGRFQLTGDPAKGNCSLVIRDAQMQDESQYFFRVERGSYVRYNFMNDGFFLKVTALTQKPDVYIPETLEPGQPVTVICVFNWAFEECPPPSFSWTGAALSSQGTKPTTSHFSVLSFTPRPQDHNTDLTCHVDFSRKGVSAQRTVRLRVAYAPRDLVISISRDNTPALEPQPQGNVPYLEAQKGQFLRLLCAADSQPPATLSWVLQNRVLSSSHPWGPRPLGLELPGVKAGDSGRYTCRAENRLGSQQRALDLSVQYPPENLRVMVSQANRTVLENLGNGTSLPVLEGQSLCLVCVTHSSPPARLSWTQRGQVLSPSQPSDPGVLELPRVQVEHEGEFTCHARHPLGSQHVSLSLSVHYSPKLLGPSCSWEAEGLHCSCSSQASPAPSLRWWLGEELLEGNSSQDSFEVTPSSAGPWANSSLSLHGGLSSGLRLRCEAWNVHGAQSGSILQLPDKKGLIST

SEQ ID NO: 340 - protein, 348 aa, Artificial Sequence
  Description of Artificial Sequence: Synthetic polypeptide
DIQMTQSPSSLSASVGDRVTITCKASRDVAIAVAWYQQKPGKVPKLLIYWASTRHTGVPSRFSGSGSRTDFTLTISSLQPEDVADYFCHQYSSYPFTFGSGTKLEIKRTVAAPSVFIFPPSDEQLKSGTASVVCLLNNFYPREAKVQWKVDNALQSGNSQESVTEQDSKDSTYSLSSTLTLSKADYEKHKVYACEVTHQGLSSPVTKSFNRGECGGGGSGGGGSGGGGSEEELQVIQPDKSVLVAAGETATLRCTATSLIPVGPIQWFRGAGPGRELIYNQKEGHFPRVTTVSDLTKRNNMDFSIRIGNITPADAGTYYCVKFRKGSPDDVEFKSGAGTELSVRAKPS

SEQ ID NO: 341 - protein, 410 aa, Artificial Sequence
  Description of Artificial Sequence: Synthetic polypeptide
DIQMTQSPSSLSASVGDRVTITCKASRDVAIAVAWYQQKPGKVPKLLIYWASTRHTGVPSRFSGSGSRTDFTLTISSLQPEDVADYFCHQYSSYPFTFGSGTKLEIKRTVAAPSVFIFPPSDEQLKSGTASVVCLLNNFYPREAKVQWKVDNALQSGNSQESVTEQDSKDSTYSLSSTLTLSKADYEKHKVYACEVTHQGLSSPVTKSFNRGECGGGGSGGGGSGGGGSSEVEYRAEVGQNAYLPCFYTPAAPGNLVPVCWGKGACPVFECGNVVLRTDERDVNYWTSRYWLNGDFRKGDVSLTIENVTLADSGIYCCRIQIPGIMNDEKFNLKLVIKPAKVTPAPTRQRDFTAAFPRMLTTRGHGPAETQTLGSLPDINLTQISTLANELRDSRLANDLRDSGATIRIG

SEQ ID NO: 342 - protein, 614 aa, Artificial Sequence
  Description of Artificial Sequence: Synthetic polypeptide
QVQLVQSGAEVKKPGSSVKVSCKASGYTFTDQTIHWMRQAPGQGLEWIGYIYPRDDSPKYNENFKGKVTITADKSTSTAYMELSSLRSEDTAVYYCAIPDRSGYAWFIYWGQGTLVTVSSASTKGPSVFPLAPSSKSTSGGTAALGCLVKDYFPEPVTVSWNSGALTSGVHTFPAVLQSSGLYSLSSVVTVPSSSLGTQTYICNVNHKPSNTKVDKRVEPKSCDKTHTCPPCPAPEAAGGPSVFLFPPKPKDTLMISRTPEVTCVVVDVSHEDPEVKFNWYVDGVEVHNAKTKPREEQYNSTYRVVSVLTVLHQDWLNGKEYKCKVSNKALPAPIEKTISKAKGQPREPQVYTLPPSREEMTKNQVSLTCLVKGFYPSDIAVEWESNGQPENNYKTTPPVLDSDGSFFLYSKLTVDKSRWQQGNVFSCSVMHEALHNHYTQKSLSLSPGGGGGSGGGGSGGGGSPGWFLDSPDRPWNPPTFSPALLVVTEGDNATFTCSFSNTSESFVLNWYRMSPSNQTDKLAAFPEDRSQPGQDCRFRVTQLPNGRDFHMSVVRARRNDSGTYLCGAISLAPKAQIKESLRAELRVTERRAEVPTAHPSPSPRPAGQFQTLV

SEQ ID NO: 343 - protein, 349 aa, Artificial Sequence
  Description of Artificial Sequence: Synthetic polypeptide
DIQMTQSPSSLSASVGDRVTITCKASRDVAIAVAWYQQKPGKVPKLLIYWASTRHTGVPSRFSGSGSRTDFTLTISSLQPEDVADYFCHQYSSYPFTFGSGTKLEIKRTVAAPSVFIFPPSDEQLKSGTASVVCLLNNFYPREAKVQWKVDNALQSGNSQESVTEQDSKDSTYSLSSTLTLSKADYEKHKVYACEVTHQGLSSPVTKSFNRGECGGGGSGGGGSGGGGSKESCDVQLYIKRQSEHSILAGDPFELECPVKYCANRPHVTWCKLNGTTCVKLEDRQTSWKEEKNISFFILHFEPVLPNDNGSYRCSANFQSNLIESHSTTLYVTDVKSASERPSKDEMAS

SEQ ID NO: 344 - protein, 994 aa, Artificial Sequence
  Description of Artificial Sequence: Synthetic polypeptide
QVQLVQSGAEVKKPGSSVKVSCKASGYTFTDQTIHWMRQAPGQGLEWIGYIYPRDDSPKYNENFKGKVTITADKSTSTAYMELSSLRSEDTAVYYCAIPDRSGYAWFIYWGQGTLVTVSSASTKGPSVFPLAPSSKSTSGGTAALGCLVKDYFPEPVTVSWNSGALTSGVHTFPAVLQSSGLYSLSSVVTVPSSSLGTQTYICNVNHKPSNTKVDKRVEPKSCDKTHTCPPCPAPEAAGGPSVFLFPPKPKDTLMISRTPEVTCVVVDVSHEDPEVKFNWYVDGVEVHNAKTKPREEQYNSTYRVVSVLTVLHQDWLNGKEYKCKVSNKALPAPIEKTISKAKGQPREPQVYTLPPSREEMTKNQVSLTCLVKGFYPSDIAVEWESNGQPENNYKTTPPVLDSDGSFFLYSKLTVDKSRWQQGNVFSCSVMHEALHNHYTQKSLSLSPGGGGGSGGGGSGGGGSMDGRFWIRVQESVMVPEGLCISVPCSFSYPRQDWTGSTPAYGYWFKAVTETTKGAPVATNHQSREVEMSTRGRFQLTGDPAKGNCSLVIRDAQMQDESQYFFRVERGSYVRYNFMNDGFFLKVTALTQKPDVYIPETLEPGQPVTVICVFNWAFEECPPPSFSWTGAALSSQGTKPTTSHFSVLSFTPRPQDHNTDLTCHVDFSRKGVSAQRTVRLRVAYAPRDLVISISRDNTPALEPQPQGNVPYLEAQKGQFLRLLCAADSQPPATLSWVLQNRVLSSSHPWGPRPLGLELPGVKAGDSGRYTCRAENRLGSQQRALDLSVQYPPENLRVMVSQANRTVLENLGNGTSLPVLEGQSLCLVCVTHSSPPARLSWTQRGQVLSPSQPSDPGVLELPRVQVEHEGEFTCHARHPLGSQHVSLSLSVHYSPKLLGPSCSWEAEGLHCSCSSQASPAPSLRWWLGEELLEGNSSQDSFEVTPSSAGPWANSSLSLHGGLSSGLRLRCEAWNVHGAQSGSILQLPDKKGLIST

SEQ ID NO: 345 - protein, 583 aa, Artificial Sequence
  Description of Artificial Sequence: Synthetic polypeptide
QVQLVQSGAEVKKPGSSVKVSCKASGYTFTDQTIHWMRQAPGQGLEWIGYIYPRDDSPKYNENFKGKVTITADKSTSTAYMELSSLRSEDTAVYYCAIPDRSGYAWFIYWGQGTLVTVSSASTKGPSVFPLAPSSKSTSGGTAALGCLVKDYFPEPVTVSWNSGALTSGVHTFPAVLQSSGLYSLSSVVTVPSSSLGTQTYICNVNHKPSNTKVDKRVEPKSCDKTHTCPPCPAPEAAGGPSVFLFPPKPKDTLMISRTPEVTCVVVDVSHEDPEVKFNWYVDGVEVHNAKTKPREEQYNSTYRVVSVLTVLHQDWLNGKEYKCKVSNKALPAPIEKTISKAKGQPREPQVYTLPPSREEMTKNQVSLTCLVKGFYPSDIAVEWESNGQPENNYKTTPPVLDSDGSFFLYSKLTVDKSRWQQGNVFSCSVMHEALHNHYTQKSLSLSPGGGGGSGGGGSGGGGSEEELQVIQPDKSVLVAAGETATLRCTATSLIPVGPIQWFRGAGPGRELIYNQKEGHFPRVTTVSDLTKRNNMDFSIRIGNITPADAGTYYCVKFRKGSPDDVEFKSGAGTELSVRAKPS

SEQ ID NO: 346 - protein, 601 aa, Artificial Sequence
  Description of Artificial Sequence: Synthetic polypeptide
QVQLVQSGAEVKKPGSSVKVSCKASGYTFTDQTIHWMRQAPGQGLEWIGYIYPRDDSPKYNENFKGKVTITADKSTSTAYMELSSLRSEDTAVYYCAIPDRSGYAWFIYWGQGTLVTVSSASTKGPSVFPLAPSSKSTSGGTAALGCLVKDYFPEPVTVSWNSGALTSGVHTFPAVLQSSGLYSLSSVVTVPSSSLGTQTYICNVNHKPSNTKVDKRVEPKSCDKTHTCPPCPAPEAAGGPSVFLFPPKPKDTLMISRTPEVTCVVVDVSHEDPEVKFNWYVDGVEVHNAKTKPREEQYNSTYRVVSVLTVLHQDWLNGKEYKCKVSNKALPAPIEKTISKAKGQPREPQVYTLPPSREEMTKNQVSLTCLVKGFYPSDIAVEWESNGQPENNYKTTPPVLDSDGSFFLYSKLTVDKSRWQQGNVFSCSVMHEALHNHYTQKSLSLSPGGGGGSGGGGSGGGGSTIPPHVQKSVNNDMIVTDNNGAVKFPQLCKFCDVRFSTCDNQKSCMSNCSITSICEKPQEVCVAVWRKNDENITLETVCHDPKLPYHDFILEDAASPKCIMKEKKKPGETFFMCSCSSDECNDNIIFSEEYNTSNPD

SEQ ID NO: 347 - protein, 645 aa, Artificial Sequence
  Description of Artificial Sequence: Synthetic polypeptide
QVQLVQSGAEVKKPGSSVKVSCKASGYTFTDQTIHWMRQAPGQGLEWIGYIYPRDDSPKYNENFKGKVTITADKSTSTAYMELSSLRSEDTAVYYCAIPDRSGYAWFIYWGQGTLVTVSSASTKGPSVFPLAPSSKSTSGGTAALGCLVKDYFPEPVTVSWNSGALTSGVHTFPAVLQSSGLYSLSSVVTVPSSSLGTQTYICNVNHKPSNTKVDKRVEPKSCDKTHTCPPCPAPEAAGGPSVFLFPPKPKDTLMISRTPEVTCVVVDVSHEDPEVKFNWYVDGVEVHNAKTKPREEQYNSTYRVVSVLTVLHQDWLNGKEYKCKVSNKALPAPIEKTISKAKGQPREPQVYTLPPSREEMTKNQVSLTCLVKGFYPSDIAVEWESNGQPENNYKTTPPVLDSDGSFFLYSKLTVDKSRWQQGNVFSCSVMHEALHNHYTQKSLSLSPGGGGGSGGGGSGGGGSSEVEYRAEVGQNAYLPCFYTPAAPGNLVPVCWGKGACPVFECGNVVLRTDERDVNYWTSRYWLNGDFRKGDVSLTIENVTLADSGIYCCRIQIPGIMNDEKFNLKLVIKPAKVTPAPTRQRDFTAAFPRMLTTRGHGPAETQTLGSLPDINLTQISTLANELRDSRLANDLRDSGATIRIG

SEQ ID NO: 348 - protein, 669 aa, Artificial Sequence
  Description of Artificial Sequence: Synthetic polypeptide
QVQLVQSGAEVKKPGSSVKVSCKASGYTFTDQTIHWMRQAPGQGLEWIGYIYPRDDSPKYNENFKGKVTITADKSTSTAYMELSSLRSEDTAVYYCAIPDRSGYAWFIYWGQGTLVTVSSASTKGPSVFPLAPSSKSTSGGTAALGCLVKDYFPEPVTVSWNSGALTSGVHTFPAVLQSSGLYSLSSVVTVPSSSLGTQTYICNVNHKPSNTKVDKRVEPKSCDKTHTCPPCPAPEAAGGPSVFLFPPKPKDTLMISRTPEVTCVVVDVSHEDPEVKFNWYVDGVEVHNAKTKPREEQYNSTYRVVSVLTVLHQDWLNGKEYKCKVSNKALPAPIEKTISKAKGQPREPQVYTLPPSREEMTKNQVSLTCLVKGFYPSDIAVEWESNGQPENNYKTTPPVLDSDGSFFLYSKLTVDKSRWQQGNVFSCSVMHEALHNHYTQKSLSLSPGGGGGSGGGGSGGGGSSDTGRPFVEMYSEIPEIIHMTEGRELVIPCRVTSPNITVTLKKFPLDTLIPDGKRIIWDSRKGFIISNATYKEIGLLTCEATVNGHLYKTNYLTHRQTNTIIDVVLSPSHGIELSVGEKLVLNCTARTELNVGIDFNWEYPSSKHQHKKLVNRDLKTQSGSEMKKFLSTLTIDGVTRSDQGLYTCAASSGLMTKKNSTFVRVHEK

SEQ ID NO: 349 - protein, 583 aa, Artificial Sequence
  Description of Artificial Sequence: Synthetic polypeptide
QVQLVESGGGVVQPGRSLRLSCAASGFTFSVYGMNWVRQAPGKGLEWVAIIWYDGDNQYYADSVKGRFTISRDNSKNTLYLQMNGLRAEDTAVYYCARDLRTGPFDYWGQGTLVTVSSASTKGPSVFPLAPSSKSTSGGTAALGCLVKDYFPEPVTVSWNSGALTSGVHTFPAVLQSSGLYSLSSVVTVPSSSLGTQTYICNVNHKPSNTKVDKRVEPKSCDKTHTCPPCPAPELLGGPSVFLFPPKPKDTLMISRTPEVTCVVVDVSHEDPEVKFNWYVDGVEVHNAKTKPREEQYNSTYRVVSVLTVLHQDWLNGKEYKCKVSNKALPAPIEKTISKAKGQPREPQVYTLPPSREEMTKNQVSLTCLVKGFYPSDIAVEWESNGQPENNYKTTPPVLDSDGSFFLYSKLTVDKSRWQQGNVFSCSVMHEALHNHYTQKSLSLSPGKGGGGSGGGGSGGGGSKESCDVQLYIKRQSEHSILAGDPFELECPVKYCANRPHVTWCKLNGTTCVKLEDRQTSWKEEKNISFFILHFEPVLPNDNGSYRCSANFQSNLIESHSTTLYVTDVKSASERPSKDEMAS

SEQ ID NO: 350 - protein, 379 aa, Artificial Sequence
  Description of Artificial Sequence: Synthetic polypeptide
EIVLTQSPDFQSVTPKEKVTITCRASQSIGSSLHWYQQKPDQSPKLLIKYASQSFSGVPSRFSGSGSGTDFTLTINSLEAEDAAAYYCHQSSSLPFTFGPGTKVDIKRTVAAPSVFIFPPSDEQLKSGTASVVCLLNNFYPREAKVQWKVDNALQSGNSQESVTEQDSKDSTYSLSSTLTLSKADYEKHKVYACEVTHQGLSSPVTKSFNRGECGGGGSGGGGSGGGGSPGWFLDSPDRPWNPPTFSPALLVVTEGDNATFTCSFSNTSESFVLNWYRMSPSNQTDKLAAFPEDRSQPGQDCRFRVTQLPNGRDFHMSVVRARRNDSGTYLCGAISLAPKAQIKESLRAELRVTERRAEVPTAHPSPSPRPAGQFQTLV

SEQ ID NO: 351 - protein, 759 aa, Artificial Sequence
  Description of Artificial Sequence: Synthetic polypeptide
EIVLTQSPDFQSVTPKEKVTITCRASQSIGSSLHWYQQKPDQSPKLLIKYASQSFSGVPSRFSGSGSGTDFTLTINSLEAEDAAAYYCHQSSSLPFTFGPGTKVDIKRTVAAPSVFIFPPSDEQLKSGTASVVCLLNNFYPREAKVQWKVDNALQSGNSQESVTEQDSKDSTYSLSSTLTLSKADYEKHKVYACEVTHQGLSSPVTKSFNRGECGGGGSGGGGSGGGGSMDGRFWIRVQESVMVPEGLCISVPCSFSYPRQDWTGSTPAYGYWFKAVTETTKGAPVATNHQSREVEMSTRGRFQLTGDPAKGNCSLVIRDAQMQDESQYFFRVERGSYVRYNFMNDGFFLKVTALTQKPDVYIPETLEPGQPVTVICVFNWAFEECPPPSFSWTGAALSSQGTKPTTSHFSVLSFTPRPQDHNTDLTCHVDFSRKGVSAQRTVRLRVAYAPRDLVISISRDNTPALEPQPQGNVPYLEAQKGQFLRLLCAADSQPPATLSWVLQNRVLSSSHPWGPRPLGLELPGVKAGDSGRYTCRAENRLGSQQRALDLSVQYPPENLRVMVSQANRTVLENLGNGTSLPVLEGQSLCLVCVTHSSPPARLSWTQRGQVLSPSQPSDPGVLELPRVQVEHEGEFTCHARHPLGSQHVSLSLSVHYSPKLLGPSCSWEAEGLHCSCSSQASPAPSLRWWLGEELLEGNSSQDSFEVTPSSAGPWANSSLSLHGGLSSGLRLRCEAWNVHGAQSGSILQLPDKKGLIST

SEQ ID NO: 352 - protein, 348 aa, Artificial Sequence
  Description of Artificial Sequence: Synthetic polypeptide
EIVLTQSPDFQSVTPKEKVTITCRASQSIGSSLHWYQQKPDQSPKLLIKYASQSFSGVPSRFSGSGSGTDFTLTINSLEAEDAAAYYCHQSSSLPFTFGPGTKVDIKRTVAAPSVFIFPPSDEQLKSGTASVVCLLNNFYPREAKVQWKVDNALQSGNSQESVTEQDSKDSTYSLSSTLTLSKADYEKHKVYACEVTHQGLSSPVTKSFNRGECGGGGSGGGGSGGGGSEEELQVIQPDKSVLVAAGETATLRCTATSLIPVGPIQWFRGAGPGRELIYNQKEGHFPRVTTVSDLTKRNNMDFSIRIGNITPADAGTYYCVKFRKGSPDDVEFKSGAGTELSVRAKPS

SEQ ID NO: 353 - protein, 410 aa, Artificial Sequence
  Description of Artificial Sequence: Synthetic polypeptide
EIVLTQSPDFQSVTPKEKVTITCRASQSIGSSLHWYQQKPDQSPKLLIKYASQSFSGVPSRFSGSGSGTDFTLTINSLEAEDAAAYYCHQSSSLPFTFGPGTKVDIKRTVAAPSVFIFPPSDEQLKSGTASVVCLLNNFYPREAKVQWKVDNALQSGNSQESVTEQDSKDSTYSLSSTLTLSKADYEKHKVYACEVTHQGLSSPVTKSFNRGECGGGGSGGGGSGGGGSSEVEYRAEVGQNAYLPCFYTPAAPGNLVPVCWGKGACPVFECGNVVLRTDERDVNYWTSRYWLNGDFRKGDVSLTIENVTLADSGIYCCRIQIPGIMNDEKFNLKLVIKPAKVTPAPTRQRDFTAAFPRMLTTRGHGPAETQTLGSLPDINLTQISTLANELRDSRLANDLRDSGATIRIG

SEQ ID NO: 354 - protein, 613 aa, Artificial Sequence
  Description of Artificial Sequence: Synthetic polypeptide
QVQLVESGGGVVQPGRSLRLSCAASGFTFSVYGMNWVRQAPGKGLEWVAIIWYDGDNQYYADSVKGRFTISRDNSKNTLYLQMNGLRAEDTAVYYCARDLRTGPFDYWGQGTLVTVSSASTKGPSVFPLAPSSKSTSGGTAALGCLVKDYFPEPVTVSWNSGALTSGVHTFPAVLQSSGLYSLSSVVTVPSSSLGTQTYICNVNHKPSNTKVDKRVEPKSCDKTHTCPPCPAPELLGGPSVFLFPPKPKDTLMISRTPEVTCVVVDVSHEDPEVKFNWYVDGVEVHNAKTKPREEQYNSTYRVVSVLTVLHQDWLNGKEYKCKVSNKALPAPIEKTISKAKGQPREPQVYTLPPSREEMTKNQVSLTCLVKGFYPSDIAVEWESNGQPENNYKTTPPVLDSDGSFFLYSKLTVDKSRWQQGNVFSCSVMHEALHNHYTQKSLSLSPGKGGGGSGGGGSGGGGSPGWFLDSPDRPWNPPTFSPALLVVTEGDNATFTCSFSNTSESFVLNWYRMSPSNQTDKLAAFPEDRSQPGQDCRFRVTQLPNGRDFHMSVVRARRNDSGTYLCGAISLAPKAQIKESLRAELRVTERRAEVPTAHPSPSPRPAGQFQTLV

SEQ ID NO: 355 - protein, 349 aa, Artificial Sequence
  Description of Artificial Sequence: Synthetic polypeptide
EIVLTQSPDFQSVTPKEKVTITCRASQSIGSSLHWYQQKPDQSPKLLIKYASQSFSGVPSRFSGSGSGTDFTLTINSLEAEDAAAYYCHQSSSLPFTFGPGTKVDIKRTVAAPSVFIFPPSDEQLKSGTASVVCLLNNFYPREAKVQWKVDNALQSGNSQESVTEQDSKDSTYSLSSTLTLSKADYEKHKVYACEVTHQGLSSPVTKSFNRGECGGGGSGGGGSGGGGSKESCDVQLYIKRQSEHSILAGDPFELECPVKYCANRPHVTWCKLNGTTCVKLEDRQTSWKEEKNISFFILHFEPVLPNDNGSYRCSANFQSNLIESHSTTLYVTDVKSASERPSKDEMAS

SEQ ID NO: 356 - protein, 993 aa, Artificial Sequence
  Description of Artificial Sequence: Synthetic polypeptide
QVQLVESGGGVVQPGRSLRLSCAASGFTFSVYGMNWVRQAPGKGLEWVAIIWYDGDNQYYADSVKGRFTISRDNSKNTLYLQMNGLRAEDTAVYYCARDLRTGPFDYWGQGTLVTVSSASTKGPSVFPLAPSSKSTSGGTAALGCLVKDYFPEPVTVSWNSGALTSGVHTFPAVLQSSGLYSLSSVVTVPSSSLGTQTYICNVNHKPSNTKVDKRVEPKSCDKTHTCPPCPAPELLGGPSVFLFPPKPKDTLMISRTPEVTCVVVDVSHEDPEVKFNWYVDGVEVHNAKTKPREEQYNSTYRVVSVLTVLHQDWLNGKEYKCKVSNKALPAPIEKTISKAKGQPREPQVYTLPPSREEMTKNQVSLTCLVKGFYPSDIAVEWESNGQPENNYKTTPPVLDSDGSFFLYSKLTVDKSRWQQGNVFSCSVMHEALHNHYTQKSLSLSPGKGGGGSGGGGSGGGGSMDGRFWIRVQESVMVPEGLCISVPCSFSYPRQDWTGSTPAYGYWFKAVTETTKGAPVATNHQSREVEMSTRGRFQLTGDPAKGNCSLVIRDAQMQDESQYFFRVERGSYVRYNFMNDGFFLKVTALTQKPDVYIPETLEPGQPVTVICVFNWAFEECPPPSFSWTGAALSSQGTKPTTSHFSVLSFTPRPQDHNTDLTCHVDFSRKGVSAQRTVRLRVAYAPRDLVISISRDNTPALEPQPQGNVPYLEAQKGQFLRLLCAADSQPPATLSWVLQNRVLSSSHPWGPRPLGLELPGVKAGDSGRYTCRAENRLGSQQRALDLSVQYPPENLRVMVSQANRTVLENLGNGTSLPVLEGQSLCLVCVTHSSPPARLSWTQRGQVLSPSQPSDPGVLELPRVQVEHEGEFTCHARHPLGSQHVSLSLSVHYSPKLLGPSCSWEAEGLHCSCSSQASPAPSLRWWLGEELLEGNSSQDSFEVTPSSAGPWANSSLSLHGGLSSGLRLRCEAWNVHGAQSGSILQLPDKKGLIST

SEQ ID NO: 357 - protein, 582 aa, Artificial Sequence
  Description of Artificial Sequence: Synthetic polypeptide
QVQLVESGGGVVQPGRSLRLSCAASGFTFSVYGMNWVRQAPGKGLEWVAIIWYDGDNQYYADSVKGRFTISRDNSKNTLYLQMNGLRAEDTAVYYCARDLRTGPFDYWGQGTLVTVSSASTKGPSVFPLAPSSKSTSGGTAALGCLVKDYFPEPVTVSWNSGALTSGVHTFPAVLQSSGLYSLSSVVTVPSSSLGTQTYICNVNHKPSNTKVDKRVEPKSCDKTHTCPPCPAPELLGGPSVFLFPPKPKDTLMISRTPEVTCVVVDVSHEDPEVKFNWYVDGVEVHNAKTKPREEQYNSTYRVVSVLTVLHQDWLNGKEYKCKVSNKALPAPIEKTISKAKGQPREPQVYTLPPSREEMTKNQVSLTCLVKGFYPSDIAVEWESNGQPENNYKTTPPVLDSDGSFFLYSKLTVDKSRWQQGNVFSCSVMHEALHNHYTQKSLSLSPGKGGGGSGGGGSGGGGSEEELQVIQPDKSVLVAAGETATLRCTATSLIPVGPIQWFRGAGPGRELIYNQKEGHFPRVTTVSDLTKRNNMDFSIRIGNITPADAGTYYCVKFRKGSPDDVEFKSGAGTELSVRAKPS

SEQ ID NO: 358 - protein, 600 aa, Artificial Sequence
  Description of Artificial Sequence: Synthetic polypeptide
QVQLVESGGGVVQPGRSLRLSCAASGFTFSVYGMNWVRQAPGKGLEWVAIIWYDGDNQYYADSVKGRFTISRDNSKNTLYLQMNGLRAEDTAVYYCARDLRTGPFDYWGQGTLVTVSSASTKGPSVFPLAPSSKSTSGGTAALGCLVKDYFPEPVTVSWNSGALTSGVHTFPAVLQSSGLYSLSSVVTVPSSSLGTQTYICNVNHKPSNTKVDKRVEPKSCDKTHTCPPCPAPELLGGPSVFLFPPKPKDTLMISRTPEVTCVVVDVSHEDPEVKFNWYVDGVEVHNAKTKPREEQYNSTYRVVSVLTVLHQDWLNGKEYKCKVSNKALPAPIEKTISKAKGQPREPQVYTLPPSREEMTKNQVSLTCLVKGFYPSDIAVEWESNGQPENNYKTTPPVLDSDGSFFLYSKLTVDKSRWQQGNVFSCSVMHEALHNHYTQKSLSLSPGKGGGGSGGGGSGGGGSTIPPHVQKSVNNDMIVTDNNGAVKFPQLCKFCDVRFSTCDNQKSCMSNCSITSICEKPQEVCVAVWRKNDENITLETVCHDPKLPYHDFILEDAASPKCIMKEKKKPGETFFMCSCSSDECNDNIIFSEEYNTSNPD

SEQ ID NO: 359 - protein, 644 aa, Artificial Sequence
  Description of Artificial Sequence: Synthetic polypeptide
QVQLVESGGGVVQPGRSLRLSCAASGFTFSVYGMNWVRQAPGKGLEWVAIIWYDGDNQYYADSVKGRFTISRDNSKNTLYLQMNGLRAEDTAVYYCARDLRTGPFDYWGQGTLVTVSSASTKGPSVFPLAPSSKSTSGGTAALGCLVKDYFPEPVTVSWNSGALTSGVHTFPAVLQSSGLYSLSSVVTVPSSSLGTQTYICNVNHKPSNTKVDKRVEPKSCDKTHTCPPCPAPELLGGPSVFLFPPKPKDTLMISRTPEVTCVVVDVSHEDPEVKFNWYVDGVEVHNAKTKPREEQYNSTYRVVSVLTVLHQDWLNGKEYKCKVSNKALPAPIEKTISKAKGQPREPQVYTLPPSREEMTKNQVSLTCLVKGFYPSDIAVEWESNGQPENNYKTTPPVLDSDGSFFLYSKLTVDKSRWQQGNVFSCSVMHEALHNHYTQKSLSLSPGKGGGGSGGGGSGGGGSSEVEYRAEVGQNAYLPCFYTPAAPGNLVPVCWGKGACPVFECGNVVLRTDERDVNYWTSRYWLNGDFRKGDVSLTIENVTLADSGIYCCRIQIPGIMNDEKFNLKLVIKPAKVTPAPTRQRDFTAAFPRMLTTRGHGPAETQTLGSLPDINLTQISTLANELRDSRLANDLRDSGATIRIG

SEQ ID NO: 360 - protein, 668 aa, Artificial Sequence
  Description of Artificial Sequence: Synthetic polypeptide
QVQLVESGGGVVQPGRSLRLSCAASGFTFSVYGMNWVRQAPGKGLEWVAIIWYDGDNQYYADSVKGRFTISRDNSKNTLYLQMNGLRAEDTAVYYCARDLRTGPFDYWGQGTLVTVSSASTKGPSVFPLAPSSKSTSGGTAALGCLVKDYFPEPVTVSWNSGALTSGVHTFPAVLQSSGLYSLSSVVTVPSSSLGTQTYICNVNHKPSNTKVDKRVEPKSCDKTHTCPPCPAPELLGGPSVFLFPPKPKDTLMISRTPEVTCVVVDVSHEDPEVKFNWYVDGVEVHNAKTKPREEQYNSTYRVVSVLTVLHQDWLNGKEYKCKVSNKALPAPIEKTISKAKGQPREPQVYTLPPSREEMTKNQVSLTCLVKGFYPSDIAVEWESNGQPENNYKTTPPVLDSDGSFFLYSKLTVDKSRWQQGNVFSCSVMHEALHNHYTQKSLSLSPGKGGGGSGGGGSGGGGSSDTGRPFVEMYSEIPEIIHMTEGRELVIPCRVTSPNITVTLKKFPLDTLIPDGKRIIWDSRKGFIISNATYKEIGLLTCEATVNGHLYKTNYLTHRQTNTIIDVVLSPSHGIELSVGEKLVLNCTARTELNVGIDFNWEYPSSKHQHKKLVNRDLKTQSGSEMKKFLSTLTIDGVTRSDQGLYTCAASSGLMTKKNSTFVRVHEK

SEQ ID NO: 361 - protein, 588 aa, Artificial Sequence
  Description of Artificial Sequence: Synthetic polypeptide
EVQLVESGGGLVQPGGSLRLSCAASGYTFTNYGMNWVRQAPGKGLEWVGWINTYTGEPTYAADFKRRFTFSLDTSKSTAYLQMNSLRAEDTAVYYCAKYPHYYGSSHWYFDVWGQGTLVTVSSASTKGPSVFPLAPSSKSTSGGTAALGCLVKDYFPEPVTVSWNSGALTSGVHTFPAVLQSSGLYSLSSVVTVPSSSLGTQTYICNVNHKPSNTKVDKKVEPKSCDKTHTCPPCPAPELLGGPSVFLFPPKPKDTLMISRTPEVTCVVVDVSHEDPEVKFNWYVDGVEVHNAKTKPREEQYNSTYRVVSVLTVLHQDWLNGKEYKCKVSNKALPAPIEKTISKAKGQPREPQVYTLPPSREEMTKNQVSLTCLVKGFYPSDIAVEWESNGQPENNYKTTPPVLDSDGSFFLYSKLTVDKSRWQQGNVFSCSVMHEALHNHYTQKSLSLSPGKGGGGSGGGGSGGGGSKESCDVQLYIKRQSEHSILAGDPFELECPVKYCANRPHVTWCKLNGTTCVKLEDRQTSWKEEKNISFFILHFEPVLPNDNGSYRCSANFQSNLIESHSTTLYVTDVKSASERPSKDEMAS

SEQ ID NO: 362 - protein, 379 aa, Artificial Sequence
  Description of Artificial Sequence: Synthetic polypeptide
DIQMTQSPSSLSASVGDRVTITCSASQDISNYLNWYQQKPGKAPKVLIYFTSSLHSGVPSRFSGSGSGTDFTLTISSLQPEDFATYYCQQYSTVPWTFGQGTKVEIKRTVAAPSVFIFPPSDEQLKSGTASVVCLLNNFYPREAKVQWKVDNALQSGNSQESVTEQDSKDSTYSLSSTLTLSKADYEKHKVYACEVTHQGLSSPVTKSFNRGECGGGGSGGGGSGGGGSPGWFLDSPDRPWNPPTFSPALLVVTEGDNATFTCSFSNTSESFVLNWYRMSPSNQTDKLAAFPEDRSQPGQDCRFRVTQLPNGRDFHMSVVRARRNDSGTYLCGAISLAPKAQIKESLRAELRVTERRAEVPTAHPSPSPRPAGQFQTLV

SEQ ID NO: 363 - protein, 759 aa, Artificial Sequence
  Description of Artificial Sequence: Synthetic polypeptide
DIQMTQSPSSLSASVGDRVTITCSASQDISNYLNWYQQKPGKAPKVLIYFTSSLHSGVPSRFSGSGSGTDFTLTISSLQPEDFATYYCQQYSTVPWTFGQGTKVEIKRTVAAPSVFIFPPSDEQLKSGTASVVCLLNNFYPREAKVQWKVDNALQSGNSQESVTEQDSKDSTYSLSSTLTLSKADYEKHKVYACEVTHQGLSSPVTKSFNRGECGGGGSGGGGSGGGGSMDGRFWIRVQESVMVPEGLCISVPCSFSYPRQDWTGSTPAYGYWFKAVTETTKGAPVATNHQSREVEMSTRGRFQLTGDPAKGNCSLVIRDAQMQDESQYFFRVERGSYVRYNFMNDGFFLKVTALTQKPDVYIPETLEPGQPVTVICVFNWAFEECPPPSFSWTGAALSSQGTKPTTSHFSVLSFTPRPQDHNTDLTCHVDFSRKGVSAQRTVRLRVAYAPRDLVISISRDNTPALEPQPQGNVPYLEAQKGQFLRLLCAADSQPPATLSWVLQNRVLSSSHPWGPRPLGLELPGVKAGDSGRYTCRAENRLGSQQRALDLSVQYPPENLRVMVSQANRTVLENLGNGTSLPVLEGQSLCLVCVTHSSPPARLSWTQRGQVLSPSQPSDPGVLELPRVQVEHEGEFTCHARHPLGSQHVSLSLSVHYSPKLLGPSCSWEAEGLHCSCSSQASPAPSLRWWLGEELLEGNSSQDSFEVTPSSAGPWANSSLSLHGGLSSGLRLRCEAWNVHGAQSGSILQLPDKKGLIST

SEQ ID NO: 364 - protein, 348 aa, Artificial Sequence
  Description of Artificial Sequence: Synthetic polypeptide
DIQMTQSPSSLSASVGDRVTITCSASQDISNYLNWYQQKPGKAPKVLIYFTSSLHSGVPSRFSGSGSGTDFTLTISSLQPEDFATYYCQQYSTVPWTFGQGTKVEIKRTVAAPSVFIFPPSDEQLKSGTASVVCLLNNFYPREAKVQWKVDNALQSGNSQESVTEQDSKDSTYSLSSTLTLSKADYEKHKVYACEVTHQGLSSPVTKSFNRGECGGGGSGGGGSGGGGSEEELQVIQPDKSVLVAAGETATLRCTATSLIPVGPIQWFRGAGPGRELIYNQKEGHFPRVTTVSDLTKRNNMDFSIRIGNITPADAGTYYCVKFRKGSPDDVEFKSGAGTELSVRAKPS

SEQ ID NO: 365 - protein, 410 aa, Artificial Sequence
  Description of Artificial Sequence: Synthetic polypeptide
DIQMTQSPSSLSASVGDRVTITCSASQDISNYLNWYQQKPGKAPKVLIYFTSSLHSGVPSRFSGSGSGTDFTLTISSLQPEDFATYYCQQYSTVPWTFGQGTKVEIKRTVAAPSVFIFPPSDEQLKSGTASVVCLLNNFYPREAKVQWKVDNALQSGNSQESVTEQDSKDSTYSLSSTLTLSKADYEKHKVYACEVTHQGLSSPVTKSFNRGECGGGGSGGGGSGGGGSSEVEYRAEVGQNAYLPCFYTPAAPGNLVPVCWGKGACPVFECGNVVLRTDERDVNYWTSRYWLNGDFRKGDVSLTIENVTLADSGIYCCRIQIPGIMNDEKFNLKLVIKPAKVTPAPTRQRDFTAAFPRMLTTRGHGPAETQTLGSLPDINLTQISTLANELRDSRLANDLRDSGATIRIG

SEQ ID NO: 366 - protein, 618 aa, Artificial Sequence
  Description of Artificial Sequence: Synthetic polypeptide
EVQLVESGGGLVQPGGSLRLSCAASGYTFTNYGMNWVRQAPGKGLEWVGWINTYTGEPTYAADFKRRFTFSLDTSKSTAYLQMNSLRAEDTAVYYCAKYPHYYGSSHWYFDVWGQGTLVTVSSASTKGPSVFPLAPSSKSTSGGTAALGCLVKDYFPEPVTVSWNSGALTSGVHTFPAVLQSSGLYSLSSVVTVPSSSLGTQTYICNVNHKPSNTKVDKKVEPKSCDKTHTCPPCPAPELLGGPSVFLFPPKPKDTLMISRTPEVTCVVVDVSHEDPEVKFNWYVDGVEVHNAKTKPREEQYNSTYRVVSVLTVLHQDWLNGKEYKCKVSNKALPAPIEKTISKAKGQPREPQVYTLPPSREEMTKNQVSLTCLVKGFYPSDIAVEWESNGQPENNYKTTPPVLDSDGSFFLYSKLTVDKSRWQQGNVFSCSVMHEALHNHYTQKSLSLSPGKGGGGSGGGGSGGGGSPGWFLDSPDRPWNPPTFSPALLVVTEGDNATFTCSFSNTSESFVLNWYRMSPSNQTDKLAAFPEDRSQPGQDCRFRVTQLPNGRDFHMSVVRARRNDSGTYLCGAISLAPKAQIKESLRAELRVTERRAEVPTAHPSPSPRPAGQFQTLV

SEQ ID NO: 367 - protein, 349 aa, Artificial Sequence
  Description of Artificial Sequence: Synthetic polypeptide
DIQMTQSPSSLSASVGDRVTITCSASQDISNYLNWYQQKPGKAPKVLIYFTSSLHSGVPSRFSGSGSGTDFTLTISSLQPEDFATYYCQQYSTVPWTFGQGTKVEIKRTVAAPSVFIFPPSDEQLKSGTASVVCLLNNFYPREAKVQWKVDNALQSGNSQESVTEQDSKDSTYSLSSTLTLSKADYEKHKVYACEVTHQGLSSPVTKSFNRGECGGGGSGGGGSGGGGSKESCDVQLYIKRQSEHSILAGDPFELECPVKYCANRPHVTWCKLNGTTCVKLEDRQTSWKEEKNISFFILHFEPVLPNDNGSYRCSANFQSNLIESHSTTLYVTDVKSASERPSKDEMAS

SEQ ID NO: 368 - protein, 998 aa, Artificial Sequence
  Description of Artificial Sequence: Synthetic polypeptide
EVQLVESGGGLVQPGGSLRLSCAASGYTFTNYGMNWVRQAPGKGLEWVGWINTYTGEPTYAADFKRRFTFSLDTSKSTAYLQMNSLRAEDTAVYYCAKYPHYYGSSHWYFDVWGQGTLVTVSSASTKGPSVFPLAPSSKSTSGGTAALGCLVKDYFPEPVTVSWNSGALTSGVHTFPAVLQSSGLYSLSSVVTVPSSSLGTQTYICNVNHKPSNTKVDKKVEPKSCDKTHTCPPCPAPELLGGPSVFLFPPKPKDTLMISRTPEVTCVVVDVSHEDPEVKFNWYVDGVEVHNAKTKPREEQYNSTYRVVSVLTVLHQDWLNGKEYKCKVSNKALPAPIEKTISKAKGQPREPQVYTLPPSREEMTKNQVSLTCLVKGFYPSDIAVEWESNGQPENNYKTTPPVLDSDGSFFLYSKLTVDKSRWQQGNVFSCSVMHEALHNHYTQKSLSLSPGKGGGGSGGGGSGGGGSMDGRFWIRVQESVMVPEGLCISVPCSFSYPRQDWTGSTPAYGYWFKAVTETTKGAPVATNHQSREVEMSTRGRFQLTGDPAKGNCSLVIRDAQMQDESQYFFRVERGSYVRYNFMNDGFFLKVTALTQKPDVYIPETLEPGQPVTVICVFNWAFEECPPPSFSWTGAALSSQGTKPTTSHFSVLSFTPRPQDHNTDLTCHVDFSRKGVSAQRTVRLRVAYAPRDLVISISRDNTPALEPQPQGNVPYLEAQKGQFLRLLCAADSQPPATLSWVLQNRVLSSSHPWGPRPLGLELPGVKAGDSGRYTCRAENRLGSQQRALDLSVQYPPENLRVMVSQANRTVLENLGNGTSLPVLEGQSLCLVCVTHSSPPARLSWTQRGQVLSPSQPSDPGVLELPRVQVEHEGEFTCHARHPLGSQHVSLSLSVHYSPKLLGPSCSWEAEGLHCSCSSQASPAPSLRWWLGEELLEGNSSQDSFEVTPSSAGPWANSSLSLHGGLSSGLRLRCEAWNVHGAQSGSILQLPDKKGLIST

SEQ ID NO: 369 - protein, 587 aa, Artificial Sequence
  Description of Artificial Sequence: Synthetic polypeptide
EVQLVESGGGLVQPGGSLRLSCAASGYTFTNYGMNWVRQAPGKGLEWVGWINTYTGEPTYAADFKRRFTFSLDTSKSTAYLQMNSLRAEDTAVYYCAKYPHYYGSSHWYFDVWGQGTLVTVSSASTKGPSVFPLAPSSKSTSGGTAALGCLVKDYFPEPVTVSWNSGALTSGVHTFPAVLQSSGLYSLSSVVTVPSSSLGTQTYICNVNHKPSNTKVDKKVEPKSCDKTHTCPPCPAPELLGGPSVFLFPPKPKDTLMISRTPEVTCVVVDVSHEDPEVKFNWYVDGVEVHNAKTKPREEQYNSTYRVVSVLTVLHQDWLNGKEYKCKVSNKALPAPIEKTISKAKGQPREPQVYTLPPSREEMTKNQVSLTCLVKGFYPSDIAVEWESNGQPENNYKTTPPVLDSDGSFFLYSKLTVDKSRWQQGNVFSCSVMHEALHNHYTQKSLSLSPGKGGGGSGGGGSGGGGSEEELQVIQPDKSVLVAAGETATLRCTATSLIPVGPIQWFRGAGPGRELIYNQKEGHFPRVTTVSDLTKRNNMDFSIRIGNITPADAGTYYCVKFRKGSPDDVEFKSGAGTELSVRAKPS

SEQ ID NO: 370 - protein, 605 aa, Artificial Sequence
  Description of Artificial Sequence: Synthetic polypeptide
EVQLVESGGGLVQPGGSLRLSCAASGYTFTNYGMNWVRQAPGKGLEWVGWINTYTGEPTYAADFKRRFTFSLDTSKSTAYLQMNSLRAEDTAVYYCAKYPHYYGSSHWYFDVWGQGTLVTVSSASTKGPSVFPLAPSSKSTSGGTAALGCLVKDYFPEPVTVSWNSGALTSGVHTFPAVLQSSGLYSLSSVVTVPSSSLGTQTYICNVNHKPSNTKVDKKVEPKSCDKTHTCPPCPAPELLGGPSVFLFPPKPKDTLMISRTPEVTCVVVDVSHEDPEVKFNWYVDGVEVHNAKTKPREEQYNSTYRVVSVLTVLHQDWLNGKEYKCKVSNKALPAPIEKTISKAKGQPREPQVYTLPPSREEMTKNQVSLTCLVKGFYPSDIAVEWESNGQPENNYKTTPPVLDSDGSFFLYSKLTVDKSRWQQGNVFSCSVMHEALHNHYTQKSLSLSPGKGGGGSGGGGSGGGGSTIPPHVQKSVNNDMIVTDNNGAVKFPQLCKFCDVRFSTCDNQKSCMSNCSITSICEKPQEVCVAVWRKNDENITLETVCHDPKLPYHDFILEDAASPKCIMKEKKKPGETFFMCSCSSDECNDNIIFSEEYNTSNPD

SEQ ID NO: 371 - protein, 649 aa, Artificial Sequence
  Description of Artificial Sequence: Synthetic polypeptide
EVQLVESGGGLVQPGGSLRLSCAASGYTFTNYGMNWVRQAPGKGLEWVGWINTYTGEPTYAADFKRRFTFSLDTSKSTAYLQMNSLRAEDTAVYYCAKYPHYYGSSHWYFDVWGQGTLVTVSSASTKGPSVFPLAPSSKSTSGGTAALGCLVKDYFPEPVTVSWNSGALTSGVHTFPAVLQSSGLYSLSSVVTVPSSSLGTQTYICNVNHKPSNTKVDKKVEPKSCDKTHTCPPCPAPELLGGPSVFLFPPKPKDTLMISRTPEVTCVVVDVSHEDPEVKFNWYVDGVEVHNAKTKPREEQYNSTYRVVSVLTVLHQDWLNGKEYKCKVSNKALPAPIEKTISKAKGQPREPQVYTLPPSREEMTKNQVSLTCLVKGFYPSDIAVEWESNGQPENNYKTTPPVLDSDGSFFLYSKLTVDKSRWQQGNVFSCSVMHEALHNHYTQKSLSLSPGKGGGGSGGGGSGGGGSSEVEYRAEVGQNAYLPCFYTPAAPGNLVPVCWGKGACPVFECGNVVLRTDERDVNYWTSRYWLNGDFRKGDVSLTIENVTLADSGIYCCRIQIPGIMNDEKFNLKLVIKPAKVTPAPTRQRDFTAAFPRMLTTRGHGPAETQTLGSLPDINLTQISTLANELRDSRLANDLRDSGATIRIG

SEQ ID NO: 372 - protein, 581 aa, Artificial Sequence
  Description of Artificial Sequence: Synthetic polypeptide
EVQLVQSGGGLVKPGGSLRLSCAASGFTFSSYSMNWVRQAPGKGLEWVSSISSSSSYIYYADSVKGRFTISRDNAKNSLYLQMNSLRAEDTAVYYCARVTDAFDIWGQGTMVTVSSASTKGPSVFPLAPSSKSTSGGTAALGCLVKDYFPEPVTVSWNSGALTSGVHTFPAVLQSSGLYSLSSVVTVPSSSLGTQTYICNVNHKPSNTKVDKKVEPKSCDKTHTCPPCPAPELLGGPSVFLFPPKPKDTLMISRTPEVTCVVVDVSHEDPEVKFNWYVDGVEVHNAKTKPREEQYNSTYRVVSVLTVLHQDWLNGKEYKCKVSNKALPAPIEKTISKAKGQPREPQVYTLPPSREEMTKNQVSLTCLVKGFYPSDIAVEWESNGQPENNYKTTPPVLDSDGSFFLYSKLTVDKSRWQQGNVFSCSVMHEALHNHYTQKSLSLSPGKGGGGSGGGGSGGGGSKESCDVQLYIKRQSEHSILAGDPFELECPVKYCANRPHVTWCKLNGTTCVKLEDRQTSWKEEKNISFFILHFEPVLPNDNGSYRCSANFQSNLIESHSTTLYVTDVKSASERPSKDEMAS

SEQ ID NO: 373 - protein, 379 aa, Artificial Sequence
  Description of Artificial Sequence: Synthetic polypeptide
DIQMTQSPSSVSASIGDRVTITCRASQGIDNWLGWYQQKPGKAPKLLIYDASNLDTGVPSRFSGSGSGTYFTLTISSLQAEDFAVYFCQQAKAFPPTFGGGTKVDIKGTVAAPSVFIFPPSDEQLKSGTASVVCLLNNFYPREAKVQWKVDNALQSGNSQESVTEQDSKDSTYSLSSTLTLSKADYEKHKVYACEVTHQGLSSPVTKSFNRGECGGGGSGGGGSGGGGSPGWFLDSPDRPWNPPTFSPALLVVTEGDNATFTCSFSNTSESFVLNWYRMSPSNQTDKLAAFPEDRSQPGQDCRFRVTQLPNGRDFHMSVVRARRNDSGTYLCGAISLAPKAQIKESLRAELRVTERRAEVPTAHPSPSPRPAGQFQTLV

SEQ ID NO: 374 - protein, 759 aa, Artificial Sequence
  Description of Artificial Sequence: Synthetic polypeptide
DIQMTQSPSSVSASIGDRVTITCRASQGIDNWLGWYQQKPGKAPKLLIYDASNLDTGVPSRFSGSGSGTYFTLTISSLQAEDFAVYFCQQAKAFPPTFGGGTKVDIKGTVAAPSVFIFPPSDEQLKSGTASVVCLLNNFYPREAKVQWKVDNALQSGNSQESVTEQDSKDSTYSLSSTLTLSKADYEKHKVYACEVTHQGLSSPVTKSFNRGECGGGGSGGGGSGGGGSMDGRFWIRVQESVMVPEGLCISVPCSFSYPRQDWTGSTPAYGYWFKAVTETTKGAPVATNHQSREVEMSTRGRFQLTGDPAKGNCSLVIRDAQMQDESQYFFRVERGSYVRYNFMNDGFFLKVTALTQKPDVYIPETLEPGQPVTVICVFNWAFEECPPPSFSWTGAALSSQGTKPTTSHFSVLSFTPRPQDHNTDLTCHVDFSRKGVSAQRTVRLRVAYAPRDLVISISRDNTPALEPQPQGNVPYLEAQKGQFLRLLCAADSQPPATLSWVLQNRVLSSSHPWGPRPLGLELPGVKAGDSGRYTCRAENRLGSQQRALDLSVQYPPENLRVMVSQANRTVLENLGNGTSLPVLEGQSLCLVCVTHSSPPARLSWTQRGQVLSPSQPSDPGVLELPRVQVEHEGEFTCHARHPLGSQHVSLSLSVHYSPKLLGPSCSWEAEGLHCSCSSQASPAPSLRWWLGEELLEGNSSQDSFEVTPSSAGPWANSSLSLHGGLSSGLRLRCEAWNVHGAQSGSILQLPDKKGLIST

SEQ ID NO: 375 - protein, 348 aa, Artificial Sequence
  Description of Artificial Sequence: Synthetic polypeptide
DIQMTQSPSSVSASIGDRVTITCRASQGIDNWLGWYQQKPGKAPKLLIYDASNLDTGVPSRFSGSGSGTYFTLTISSLQAEDFAVYFCQQAKAFPPTFGGGTKVDIKGTVAAPSVFIFPPSDEQLKSGTASVVCLLNNFYPREAKVQWKVDNALQSGNSQESVTEQDSKDSTYSLSSTLTLSKADYEKHKVYACEVTHQGLSSPVTKSFNRGECGGGGSGGGGSGGGGSEEELQVIQPDKSVLVAAGETATLRCTATSLIPVGPIQWFRGAGPGRELIYNQKEGHFPRVTTVSDLTKRNNMDFSIRIGNITPADAGTYYCVKFRKGSPDDVEFKSGAGTELSVRAKPS

SEQ ID NO: 376 - protein, 410 aa, Artificial Sequence
  Description of Artificial Sequence: Synthetic polypeptide
DIQMTQSPSSVSASIGDRVTITCRASQGIDNWLGWYQQKPGKAPKLLIYDASNLDTGVPSRFSGSGSGTYFTLTISSLQAEDFAVYFCQQAKAFPPTFGGGTKVDIKGTVAAPSVFIFPPSDEQLKSGTASVVCLLNNFYPREAKVQWKVDNALQSGNSQESVTEQDSKDSTYSLSSTLTLSKADYEKHKVYACEVTHQGLSSPVTKSFNRGECGGGGSGGGGSGGGGSSEVEYRAEVGQNAYLPCFYTPAAPGNLVPVCWGKGACPVFECGNVVLRTDERDVNYWTSRYWLNGDFRKGDVSLTIENVTLADSGIYCCRIQIPGIMNDEKFNLKLVIKPAKVTPAPTRQRDFTAAFPRMLTTRGHGPAETQTLGSLPDINLTQISTLANELRDSRLANDLRDSGATIRIG

SEQ ID NO: 377 - protein, 611 aa, Artificial Sequence
  Description of Artificial Sequence: Synthetic polypeptide
EVQLVQSGGGLVKPGGSLRLSCAASGFTFSSYSMNWVRQAPGKGLEWVSSISSSSSYIYYADSVKGRFTISRDNAKNSLYLQMNSLRAEDTAVYYCARVTDAFDIWGQGTMVTVSSASTKGPSVFPLAPSSKSTSGGTAALGCLVKDYFPEPVTVSWNSGALTSGVHTFPAVLQSSGLYSLSSVVTVPSSSLGTQTYICNVNHKPSNTKVDKKVEPKSCDKTHTCPPCPAPELLGGPSVFLFPPKPKDTLMISRTPEVTCVVVDVSHEDPEVKFNWYVDGVEVHNAKTKPREEQYNSTYRVVSVLTVLHQDWLNGKEYKCKVSNKALPAPIEKTISKAKGQPREPQVYTLPPSREEMTKNQVSLTCLVKGFYPSDIAVEWESNGQPENNYKTTPPVLDSDGSFFLYSKLTVDKSRWQQGNVFSCSVMHEALHNHYTQKSLSLSPGKGGGGSGGGGSGGGGSPGWFLDSPDRPWNPPTFSPALLVVTEGDNATFTCSFSNTSESFVLNWYRMSPSNQTDKLAAFPEDRSQPGQDCRFRVTQLPNGRDFHMSVVRARRNDSGTYLCGAISLAPKAQIKESLRAELRVTERRAEVPTAHPSPSPRPAGQFQTLV

SEQ ID NO: 378 - protein, 349 aa, Artificial Sequence
  Description of Artificial Sequence: Synthetic polypeptide
DIQMTQSPSSVSASIGDRVTITCRASQGIDNWLGWYQQKPGKAPKLLIYDASNLDTGVPSRFSGSGSGTYFTLTISSLQAEDFAVYFCQQAKAFPPTFGGGTKVDIKGTVAAPSVFIFPPSDEQLKSGTASVVCLLNNFYPREAKVQWKVDNALQSGNSQESVTEQDSKDSTYSLSSTLTLSKADYEKHKVYACEVTHQGLSSPVTKSFNRGECGGGGSGGGGSGGGGSKESCDVQLYIKRQSEHSILAGDPFELECPVKYCANRPHVTWCKLNGTTCVKLEDRQTSWKEEKNISFFILHFEPVLPNDNGSYRCSANFQSNLIESHSTTLYVTDVKSASERPSKDEMAS

SEQ ID NO: 379 - protein, 991 aa, Artificial Sequence
  Description of Artificial Sequence: Synthetic polypeptide
EVQLVQSGGGLVKPGGSLRLSCAASGFTFSSYSMNWVRQAPGKGLEWVSSISSSSSYIYYADSVKGRFTISRDNAKNSLYLQMNSLRAEDTAVYYCARVTDAFDIWGQGTMVTVSSASTKGPSVFPLAPSSKSTSGGTAALGCLVKDYFPEPVTVSWNSGALTSGVHTFPAVLQSSGLYSLSSVVTVPSSSLGTQTYICNVNHKPSNTKVDKKVEPKSCDKTHTCPPCPAPELLGGPSVFLFPPKPKDTLMISRTPEVTCVVVDVSHEDPEVKFNWYVDGVEVHNAKTKPREEQYNSTYRVVSVLTVLHQDWLNGKEYKCKVSNKALPAPIEKTISKAKGQPREPQVYTLPPSREEMTKNQVSLTCLVKGFYPSDIAVEWESNGQPENNYKTTPPVLDSDGSFFLYSKLTVDKSRWQQGNVFSCSVMHEALHNHYTQKSLSLSPGKGGGGSGGGGSGGGGSMDGRFWIRVQESVMVPEGLCISVPCSFSYPRQDWTGSTPAYGYWFKAVTETTKGAPVATNHQSREVEMSTRGRFQLTGDPAKGNCSLVIRDAQMQDESQYFFRVERGSYVRYNFMNDGFFLKVTALTQKPDVYIPETLEPGQPVTVICVFNWAFEECPPPSFSWTGAALSSQGTKPTTSHFSVLSFTPRPQDHNTDLTCHVDFSRKGVSAQRTVRLRVAYAPRDLVISISRDNTPALEPQPQGNVPYLEAQKGQFLRLLCAADSQPPATLSWVLQNRVLSSSHPWGPRPLGLELPGVKAGDSGRYTCRAENRLGSQQRALDLSVQYPPENLRVMVSQANRTVLENLGNGTSLPVLEGQSLCLVCVTHSSPPARLSWTQRGQVLSPSQPSDPGVLELPRVQVEHEGEFTCHARHPLGSQHVSLSLSVHYSPKLLGPSCSWEAEGLHCSCSSQASPAPSLRWWLGEELLEGNSSQDSFEVTPSSAGPWANSSLSLHGGLSSGLRLRCEAWNVHGAQSGSILQLPDKKGLIST

SEQ ID NO: 380 - protein, 580 aa, Artificial Sequence
  Description of Artificial Sequence: Synthetic polypeptide
EVQLVQSGGGLVKPGGSLRLSCAASGFTFSSYSMNWVRQAPGKGLEWVSSISSSSSYIYYADSVKGRFTISRDNAKNSLYLQMNSLRAEDTAVYYCARVTDAFDIWGQGTMVTVSSASTKGPSVFPLAPSSKSTSGGTAALGCLVKDYFPEPVTVSWNSGALTSGVHTFPAVLQSSGLYSLSSVVTVPSSSLGTQTYICNVNHKPSNTKVDKKVEPKSCDKTHTCPPCPAPELLGGPSVFLFPPKPKDTLMISRTPEVTCVVVDVSHEDPEVKFNWYVDGVEVHNAKTKPREEQYNSTYRVVSVLTVLHQDWLNGKEYKCKVSNKALPAPIEKTISKAKGQPREPQVYTLPPSREEMTKNQVSLTCLVKGFYPSDIAVEWESNGQPENNYKTTPPVLDSDGSFFLYSKLTVDKSRWQQGNVFSCSVMHEALHNHYTQKSLSLSPGKGGGGSGGGGSGGGGSEEELQVIQPDKSVLVAAGETATLRCTATSLIPVGPIQWFRGAGPGRELIYNQKEGHFPRVTTVSDLTKRNNMDFSIRIGNITPADAGTYYCVKFRKGSPDDVEFKSGAGTELSVRAKPS

SEQ ID NO: 381 - protein, 598 aa, Artificial Sequence
  Description of Artificial Sequence: Synthetic polypeptide
EVQLVQSGGGLVKPGGSLRLSCAASGFTFSSYSMNWVRQAPGKGLEWVSSISSSSSYIYYADSVKGRFTISRDNAKNSLYLQMNSLRAEDTAVYYCARVTDAFDIWGQGTMVTVSSASTKGPSVFPLAPSSKSTSGGTAALGCLVKDYFPEPVTVSWNSGALTSGVHTFPAVLQSSGLYSLSSVVTVPSSSLGTQTYICNVNHKPSNTKVDKKVEPKSCDKTHTCPPCPAPELLGGPSVFLFPPKPKDTLMISRTPEVTCVVVDVSHEDPEVKFNWYVDGVEVHNAKTKPREEQYNSTYRVVSVLTVLHQDWLNGKEYKCKVSNKALPAPIEKTISKAKGQPREPQVYTLPPSREEMTKNQVSLTCLVKGFYPSDIAVEWESNGQPENNYKTTPPVLDSDGSFFLYSKLTVDKSRWQQGNVFSCSVMHEALHNHYTQKSLSLSPGKGGGGSGGGGSGGGGSTIPPHVQKSVNNDMIVTDNNGAVKFPQLCKFCDVRFSTCDNQKSCMSNCSITSICEKPQEVCVAVWRKNDENITLETVCHDPKLPYHDFILEDAASPKCIMKEKKKPGETFFMCSCSSDECNDNIIFSEEYNTSNPD

SEQ ID NO: 382 - protein, 642 aa, Artificial Sequence
  Description of Artificial Sequence: Synthetic polypeptide
EVQLVQSGGGLVKPGGSLRLSCAASGFTFSSYSMNWVRQAPGKGLEWVSSISSSSSYIYYADSVKGRFTISRDNAKNSLYLQMNSLRAEDTAVYYCARVTDAFDIWGQGTMVTVSSASTKGPSVFPLAPSSKSTSGGTAALGCLVKDYFPEPVTVSWNSGALTSGVHTFPAVLQSSGLYSLSSVVTVPSSSLGTQTYICNVNHKPSNTKVDKKVEPKSCDKTHTCPPCPAPELLGGPSVFLFPPKPKDTLMISRTPEVTCVVVDVSHEDPEVKFNWYVDGVEVHNAKTKPREEQYNSTYRVVSVLTVLHQDWLNGKEYKCKVSNKALPAPIEKTISKAKGQPREPQVYTLPPSREEMTKNQVSLTCLVKGFYPSDIAVEWESNGQPENNYKTTPPVLDSDGSFFLYSKLTVDKSRWQQGNVFSCSVMHEALHNHYTQKSLSLSPGKGGGGSGGGGSGGGGSSEVEYRAEVGQNAYLPCFYTPAAPGNLVPVCWGKGACPVFECGNVVLRTDERDVNYWTSRYWLNGDFRKGDVSLTIENVTLADSGIYCCRIQIPGIMNDEKFNLKLVIKPAKVTPAPTRQRDFTAAFPRMLTTRGHGPAETQTLGSLPDINLTQISTLANELRDSRLANDLRDSGATIRIG

SEQ ID NO: 383 - protein, 581 aa, Artificial Sequence
  Description of Artificial Sequence: Synthetic polypeptide
QVQLQQPGAELVKPGASVMMSCKASGYTFTNYNMHWVKQTPGQGLEWIGTIYPGNDDTSYNQKFKDKATLTADKSSSAAYMQLSSLTSEDSAVYYCARGGYRAMDYWGQTSVTVSSASTKGPSVFPLAPSSKSTSGGTAALGCLVKDYFPEPVTVSWNSGALTSGVHTFPAVLQSSGLYSLSSVVTVPSSSLGTQTYICNVNHKPSNTKVDKKVEPKSCDKTHTCPPCPAPELLGGPSVFLFPPKPKDTLMISRTPEVTCVVVDVSHEDPEVKFNWYVDGVEVHNAKTKPREEQYNSTYRVVSVLTVLHQDWLNGKEYKCKVSNKALPAPIEKTISKAKGQPREPQVYTLPPSREEMTKNQVSLTCLVKGFYPSDIAVEWESNGQPENNYKTTPPVLDSDGSFFLYSKLTVDKSRWQQGNVFSCSVMHEALHNHYTQKSLSLSPGKGGGGSGGGGSGGGGSKESCDVQLYIKRQSEHSILAGDPFELECPVKYCANRPHVTWCKLNGTTCVKLEDRQTSWKEEKNISFFILHFEPVLPNDNGSYRCSANFQSNLIESHSTTLYVTDVKSASERPSKDEMAS

SEQ ID NO: 384 - protein, 384 aa, Artificial Sequence
  Description of Artificial Sequence: Synthetic polypeptide
DVLMTQTPLSLPVSLGDQASISCRSSQSIVYSNGNTYLGWYLQKPGQSPKLLIYKVSNRFSGVPDRFSGSGSGTDFTLKISRVEAEDLGVYHCFQGSHVPYTFGGGTKVEIKRTVAAPSVFIFPPSDEQLKSGTASVVCLLNNFYPREAKVQWKVDNALQSGNSQESVTEQDSKDSTYSLSSTLTLSKADYEKHKVYACEVTHQGLSSPVTKSFNRGECGGGGSGGGGSGGGGSPGWFLDSPDRPWNPPTFSPALLVVTEGDNATFTCSFSNTSESFVLNWYRMSPSNQTDKLAAFPEDRSQPGQDCRFRVTQLPNGRDFHMSVVRARRNDSGTYLCGAISLAPKAQIKESLRAELRVTERRAEVPTAHPSPSPRPAGQFQTLV

SEQ ID NO: 385 - protein, 764 aa, Artificial Sequence
  Description of Artificial Sequence: Synthetic polypeptide
DVLMTQTPLSLPVSLGDQASISCRSSQSIVYSNGNTYLGWYLQKPGQSPKLLIYKVSNRFSGVPDRFSGSGSGTDFTLKISRVEAEDLGVYHCFQGSHVPYTFGGGTKVEIKRTVAAPSVFIFPPSDEQLKSGTASVVCLLNNFYPREAKVQWKVDNALQSGNSQESVTEQDSKDSTYSLSSTLTLSKADYEKHKVYACEVTHQGLSSPVTKSFNRGECGGGGSGGGGSGGGGSMDGRFWIRVQESVMVPEGLCISVPCSFSYPRQDWTGSTPAYGYWFKAVTETTKGAPVATNHQSREVEMSTRGRFQLTGDPAKGNCSLVIRDAQMQDESQYFFRVERGSYVRYNFMNDGFFLKVTALTQKPDVYIPETLEPGQPVTVICVFNWAFEECPPPSFSWTGAALSSQGTKPTTSHFSVLSFTPRPQDHNTDLTCHVDFSRKGVSAQRTVRLRVAYAPRDLVISISRDNTPALEPQPQGNVPYLEAQKGQFLRLLCAADSQPPATLSWVLQNRVLSSSHPWGPRPLGLELPGVKAGDSGRYTCRAENRLGSQQRALDLSVQYPPENLRVMVSQANRTVLENLGNGTSLPVLEGQSLCLVCVTHSSPPARLSWTQRGQVLSPSQPSDPGVLELPRVQVEHEGEFTCHARHPLGSQHVSLSLSVHYSPKLLGPSCSWEAEGLHCSCSSQASPAPSLRWWLGEELLEGNSSQDSFEVTPSSAGPWANSSLSLHGGLSSGLRLRCEAWNVHGAQSGSILQLPDKKGLIST

SEQ ID NO: 386 - protein, 415 aa, Artificial Sequence
  Description of Artificial Sequence: Synthetic polypeptide
DVLMTQTPLSLPVSLGDQASISCRSSQSIVYSNGNTYLGWYLQKPGQSPKLLIYKVSNRFSGVPDRFSGSGSGTDFTLKISRVEAEDLGVYHCFQGSHVPYTFGGGTKVEIKRTVAAPSVFIFPPSDEQLKSGTASVVCLLNNFYPREAKVQWKVDNALQSGNSQESVTEQDSKDSTYSLSSTLTLSKADYEKHKVYACEVTHQGLSSPVTKSFNRGECGGGGSGGGGSGGGGSSEVEYRAEVGQNAYLPCFYTPAAPGNLVPVCWGKGACPVFECGNVVLRTDERDVNYWTSRYWLNGDFRKGDVSLTIENVTLADSGIYCCRIQIPGIMNDEKFNLKLVIKPAKVTPAPTRQRDFTAAFPRMLTTRGHGPAETQTLGSLPDINLTQISTLANELRDSRLANDLRDSGATIRIG

SEQ ID NO: 387 - protein, 611 aa, Artificial Sequence
  Description of Artificial Sequence: Synthetic polypeptide
QVQLQQPGAELVKPGASVMMSCKASGYTFTNYNMHWVKQTPGQGLEWIGTIYPGNDDTSYNQKFKDKATLTADKSSSAAYMQLSSLTSEDSAVYYCARGGYRAMDYWGQTSVTVSSASTKGPSVFPLAPSSKSTSGGTAALGCLVKDYFPEPVTVSWNSGALTSGVHTFPAVLQSSGLYSLSSVVTVPSSSLGTQTYICNVNHKPSNTKVDKKVEPKSCDKTHTCPPCPAPELLGGPSVFLFPPKPKDTLMISRTPEVTCVVVDVSHEDPEVKFNWYVDGVEVHNAKTKPREEQYNSTYRVVSVLTVLHQDWLNGKEYKCKVSNKALPAPIEKTISKAKGQPREPQVYTLPPSREEMTKNQVSLTCLVKGFYPSDIAVEWESNGQPENNYKTTPPVLDSDGSFFLYSKLTVDKSRWQQGNVFSCSVMHEALHNHYTQKSLSLSPGKGGGGSGGGGSGGGGSPGWFLDSPDRPWNPPTFSPALLVVTEGDNATFTCSFSNTSESFVLNWYRMSPSNQTDKLAAFPEDRSQPGQDCRFRVTQLPNGRDFHMSVVRARRNDSGTYLCGAISLAPKAQIKESLRAELRVTERRAEVPTAHPSPSPRPAGQFQTLV

SEQ ID NO: 388 - protein, 354 aa, Artificial Sequence
  Description of Artificial Sequence: Synthetic polypeptide
DVLMTQTPLSLPVSLGDQASISCRSSQSIVYSNGNTYLGWYLQKPGQSPKLLIYKVSNRFSGVPDRFSGSGSGTDFTLKISRVEAEDLGVYHCFQGSHVPYTFGGGTKVEIKRTVAAPSVFIFPPSDEQLKSGTASVVCLLNNFYPREAKVQWKVDNALQSGNSQESVTEQDSKDSTYSLSSTLTLSKADYEKHKVYACEVTHQGLSSPVTKSFNRGECGGGGSGGGGSGGGGSKESCDVQLYIKRQSEHSILAGDPFELECPVKYCANRPHVTWCKLNGTTCVKLEDRQTSWKEEKNISFFILHFEPVLPNDNGSYRCSANFQSNLIESHSTTLYVTDVKSASERPSKDEMAS

SEQ ID NO: 389 - protein, 991 aa, Artificial Sequence
  Description of Artificial Sequence: Synthetic polypeptide
QVQLQQPGAELVKPGASVMMSCKASGYTFTNYNMHWVKQTPGQGLEWIGTIYPGNDDTSYNQKFKDKATLTADKSSSAAYMQLSSLTSEDSAVYYCARGGYRAMDYWGQTSVTVSSASTKGPSVFPLAPSSKSTSGGTAALGCLVKDYFPEPVTVSWNSGALTSGVHTFPAVLQSSGLYSLSSVVTVPSSSLGTQTYICNVNHKPSNTKVDKKVEPKSCDKTHTCPPCPAPELLGGPSVFLFPPKPKDTLMISRTPEVTCVVVDVSHEDPEVKFNWYVDGVEVHNAKTKPREEQYNSTYRVVSVLTVLHQDWLNGKEYKCKVSNKALPAPIEKTISKAKGQPREPQVYTLPPSREEMTKNQVSLTCLVKGFYPSDIAVEWESNGQPENNYKTTPPVLDSDGSFFLYSKLTVDKSRWQQGNVFSCSVMHEALHNHYTQKSLSLSPGKGGGGSGGGGSGGGGSMDGRFWIRVQESVMVPEGLCISVPCSFSYPRQDWTGSTPAYGYWFKAVTETTKGAPVATNHQSREVEMSTRGRFQLTGDPAKGNCSLVIRDAQMQDESQYFFRVERGSYVRYNFMNDGFFLKVTALTQKPDVYIPETLEPGQPVTVICVFNWAFEECPPPSFSWTGAALSSQGTKPTTSHFSVLSFTPRPQDHNTDLTCHVDFSRKGVSAQRTVRLRVAYAPRDLVISISRDNTPALEPQPQGNVPYLEAQKGQFLRLLCAADSQPPATLSWVLQNRVLSSSHPWGPRPLGLELPGVKAGDSGRYTCRAENRLGSQQRALDLSVQYPPENLRVMVSQANRTVLENLGNGTSLPVLEGQSLCLVCVTHSSPPARLSWTQRGQVLSPSQPSDPGVLELPRVQVEHEGEFTCHARHPLGSQHVSLSLSVHYSPKLLGPSCSWEAEGLHCSCSSQASPAPSLRWWLGEELLEGNSSQDSFEVTPSSAGPWANSSLSLHGGLSSGLRLRCEAWNVHGAQSGSILQLPDKKGLIST

SEQ ID NO: 390 - protein, 598 aa, Artificial Sequence
  Description of Artificial Sequence: Synthetic polypeptide
QVQLQQPGAELVKPGASVMMSCKASGYTFTNYNMHWVKQTPGQGLEWIGTIYPGNDDTSYNQKFKDKATLTADKSSSAAYMQLSSLTSEDSAVYYCARGGYRAMDYWGQTSVTVSSASTKGPSVFPLAPSSKSTSGGTAALGCLVKDYFPEPVTVSWNSGALTSGVHTFPAVLQSSGLYSLSSVVTVPSSSLGTQTYICNVNHKPSNTKVDKKVEPKSCDKTHTCPPCPAPELLGGPSVFLFPPKPKDTLMISRTPEVTCVVVDVSHEDPEVKFNWYVDGVEVHNAKTKPREEQYNSTYRVVSVLTVLHQDWLNGKEYKCKVSNKALPAPIEKTISKAKGQPREPQVYTLPPSREEMTKNQVSLTCLVKGFYPSDIAVEWESNGQPENNYKTTPPVLDSDGSFFLYSKLTVDKSRWQQGNVFSCSVMHEALHNHYTQKSLSLSPGKGGGGSGGGGSGGGGSTIPPHVQKSVNNDMIVTDNNGAVKFPQLCKFCDVRFSTCDNQKSCMSNCSITSICEKPQEVCVAVWRKNDENITLETVCHDPKLPYHDFILEDAASPKCIMKEKKKPGETFFMCSCSSDECNDNIIFSEEYNTSNPD

SEQ ID NO: 391 - protein, 642 aa, Artificial Sequence
  Description of Artificial Sequence: Synthetic polypeptide
QVQLQQPGAELVKPGASVMMSCKASGYTFTNYNMHWVKQTPGQGLEWIGTIYPGNDDTSYNQKFKDKATLTADKSSSAAYMQLSSLTSEDSAVYYCARGGYRAMDYWGQTSVTVSSASTKGPSVFPLAPSSKSTSGGTAALGCLVKDYFPEPVTVSWNSGALTSGVHTFPAVLQSSGLYSLSSVVTVPSSSLGTQTYICNVNHKPSNTKVDKKVEPKSCDKTHTCPPCPAPELLGGPSVFLFPPKPKDTLMISRTPEVTCVVVDVSHEDPEVKFNWYVDGVEVHNAKTKPREEQYNSTYRVVSVLTVLHQDWLNGKEYKCKVSNKALPAPIEKTISKAKGQPREPQVYTLPPSREEMTKNQVSLTCLVKGFYPSDIAVEWESNGQPENNYKTTPPVLDSDGSFFLYSKLTVDKSRWQQGNVFSCSVMHEALHNHYTQKSLSLSPGKGGGGSGGGGSGGGGSSEVEYRAEVGQNAYLPCFYTPAAPGNLVPVCWGKGACPVFECGNVVLRTDERDVNYWTSRYWLNGDFRKGDVSLTIENVTLADSGIYCCRIQIPGIMNDEKFNLKLVIKPAKVTPAPTRQRDFTAAFPRMLTTRGHGPAETQTLGSLPDINLTQISTLANELRDSRLANDLRDSGATIRIG

SEQ ID NO: 392 - protein, 666 aa, Artificial Sequence
  Description of Artificial Sequence: Synthetic polypeptide
QVQLQQPGAELVKPGASVMMSCKASGYTFTNYNMHWVKQTPGQGLEWIGTIYPGNDDTSYNQKFKDKATLTADKSSSAAYMQLSSLTSEDSAVYYCARGGYRAMDYWGQTSVTVSSASTKGPSVFPLAPSSKSTSGGTAALGCLVKDYFPEPVTVSWNSGALTSGVHTFPAVLQSSGLYSLSSVVTVPSSSLGTQTYICNVNHKPSNTKVDKKVEPKSCDKTHTCPPCPAPELLGGPSVFLFPPKPKDTLMISRTPEVTCVVVDVSHEDPEVKFNWYVDGVEVHNAKTKPREEQYNSTYRVVSVLTVLHQDWLNGKEYKCKVSNKALPAPIEKTISKAKGQPREPQVYTLPPSREEMTKNQVSLTCLVKGFYPSDIAVEWESNGQPENNYKTTPPVLDSDGSFFLYSKLTVDKSRWQQGNVFSCSVMHEALHNHYTQKSLSLSPGKGGGGSGGGGSGGGGSSDTGRPFVEMYSEIPEIIHMTEGRELVIPCRVTSPNITVTLKKFPLDTLIPDGKRIIWDSRKGFIISNATYKEIGLLTCEATVNGHLYKTNYLTHRQTNTIIDVVLSPSHGIELSVGEKLVLNCTARTELNVGIDFNWEYPSSKHQHKKLVNRDLKTQSGSEMKKFLSTLTIDGVTRSDQGLYTCAASSGLMTKKNSTFVRVHEK

SEQ ID NO: 393 - protein, 582 aa, Artificial Sequence
  Description of Artificial Sequence: Synthetic polypeptide
QVQLVQSGAEVKKPGSSVKVSCKASGYTFSSNVISWVRQAPGQGLEWMGGVIPIVDIANYAQRFKGRVTITADESTSTTYMELSSLRSEDTAVYYCASTLGLVLDAMDYWGQGTLVTVSSASTKGPSVFPLAPCSRSTSESTAALGCLVKDYFPEPVTVSWNSGALTSGVHTFPAVLQSSGLYSLSSVVTVPSSSLGTKTYTCNVDHKPSNTKVDKRVESKYGPPCPSCPAPEFLGGPSVFLFPPKPKDTLMISRTPEVTCVVVDVSQEDPEVQFNWYVDGVEVHNAKTKPREEQFNSTYRVVSVLTVLHQDWLNGKEYKCKVSNKGLPSSIEKTISKAKGQPREPQVYTLPPSQEEMTKNQVSLTCLVKGFYPSDIAVEWESNGQPENNYKTTPPVLDSDGSFFLYSRLTVDKSRWQEGNVFSCSVMHEALHNHYTQKSLSLSLGKGGGGSGGGGSGGGGSKESCDVQLYIKRQSEHSILAGDPFELECPVKYCANRPHVTWCKLNGTTCVKLEDRQTSWKEEKNISFFILHFEPVLPNDNGSYRCSANFQSNLIESHSTTLYVTDVKSASERPSKDEMAS

SEQ ID NO: 394 - protein, 380 aa, Artificial Sequence
  Description of Artificial Sequence: Synthetic polypeptide
ETVLTQSPGTLSLSPGERATLSCRASQSLGSSYLAWYQQKPGQAPRLLIYGASSRAPGIPDRFSGSGSGTDFTLTISRLEPEDFAVYYCQQYADSPITFGQGTRLEIKRTVAAPSVFIFPPSDEQLKSGTASVVCLLNNFYPREAKVQWKVDNALQSGNSQESVTEQDSKDSTYSLSSTLTLSKADYEKHKVYACEVTHQGLSSPVTKSFNRGECGGGGSGGGGSGGGGSPGWFLDSPDRPWNPPTFSPALLVVTEGDNATFTCSFSNTSESFVLNWYRMSPSNQTDKLAAFPEDRSQPGQDCRFRVTQLPNGRDFHMSVVRARRNDSGTYLCGAISLAPKAQIKESLRAELRVTERRAEVPTAHPSPSPRPAGQFQTLV

SEQ ID NO: 395 - protein, 760 aa, Artificial Sequence
  Description of Artificial Sequence: Synthetic polypeptide
ETVLTQSPGTLSLSPGERATLSCRASQSLGSSYLAWYQQKPGQAPRLLIYGASSRAPGIPDRFSGSGSGTDFTLTISRLEPEDFAVYYCQQYADSPITFGQGTRLEIKRTVAAPSVFIFPPSDEQLKSGTASVVCLLNNFYPREAKVQWKVDNALQSGNSQESVTEQDSKDSTYSLSSTLTLSKADYEKHKVYACEVTHQGLSSPVTKSFNRGECGGGGSGGGGSGGGGSMDGRFWIRVQESVMVPEGLCISVPCSFSYPRQDWTGSTPAYGYWFKAVTETTKGAPVATNHQSREVEMSTRGRFQLTGDPAKGNCSLVIRDAQMQDESQYFFRVERGSYVRYNFMNDGFFLKVTALTQKPDVYIPETLEPGQPVTVICVFNWAFEECPPPSFSWTGAALSSQGTKPTTSHFSVLSFTPRPQDHNTDLTCHVDFSRKGVSAQRTVRLRVAYAPRDLVISISRDNTPALEPQPQGNVPYLEAQKGQFLRLLCAADSQPPATLSWVLQNRVLSSSHPWGPRPLGLELPGVKAGDSGRYTCRAENRLGSQQRALDLSVQYPPENLRVMVSQANRTVLENLGNGTSLPVLEGQSLCLVCVTHSSPPARLSWTQRGQVLSPSQPSDPGVLELPRVQVEHEGEFTCHARHPLGSQHVSLSLSVHYSPKLLGPSCSWEAEGLHCSCSSQASPAPSLRWWLGEELLEGNSSQDSFEVTPSSAGPWANSSLSLHGGLSSGLRLRCEAWNVHGAQSGSILQLPDKKGLIST

SEQ ID NO: 396 - protein, 349 aa, Artificial Sequence
  Description of Artificial Sequence: Synthetic polypeptide
ETVLTQSPGTLSLSPGERATLSCRASQSLGSSYLAWYQQKPGQAPRLLIYGASSRAPGIPDRFSGSGSGTDFTLTISRLEPEDFAVYYCQQYADSPITFGQGTRLEIKRTVAAPSVFIFPPSDEQLKSGTASVVCLLNNFYPREAKVQWKVDNALQSGNSQESVTEQDSKDSTYSLSSTLTLSKADYEKHKVYACEVTHQGLSSPVTKSFNRGECGGGGSGGGGSGGGGSEEELQVIQPDKSVLVAAGETATLRCTATSLIPVGPIQWFRGAGPGRELIYNQKEGHFPRVTTVSDLTKRNNMDFSIRIGNITPADAGTYYCVKFRKGSPDDVEFKSGAGTELSVRAKPS

SEQ ID NO: 397 - protein, 411 aa, Artificial Sequence
  Description of Artificial Sequence: Synthetic polypeptide
ETVLTQSPGTLSLSPGERATLSCRASQSLGSSYLAWYQQKPGQAPRLLIYGASSRAPGIPDRFSGSGSGTDFTLTISRLEPEDFAVYYCQQYADSPITFGQGTRLEIKRTVAAPSVFIFPPSDEQLKSGTASVVCLLNNFYPREAKVQWKVDNALQSGNSQESVTEQDSKDSTYSLSSTLTLSKADYEKHKVYACEVTHQGLSSPVTKSFNRGECGGGGSGGGGSGGGGSSEVEYRAEVGQNAYLPCFYTPAAPGNLVPVCWGKGACPVFECGNVVLRTDERDVNYWTSRYWLNGDFRKGDVSLTIENVTLADSGIYCCRIQIPGIMNDEKFNLKLVIKPAKVTPAPTRQRDFTAAFPRMLTTRGHGPAETQTLGSLPDINLTQISTLANELRDSRLANDLRDSGATIRIG

SEQ ID NO: 398 - protein, 612 aa, Artificial Sequence
  Description of Artificial Sequence: Synthetic polypeptide
QVQLVQSGAEVKKPGSSVKVSCKASGYTFSSNVISWVRQAPGQGLEWMGGVIPIVDIANYAQRFKGRVTITADESTSTTYMELSSLRSEDTAVYYCASTLGLVLDAMDYWGQGTLVTVSSASTKGPSVFPLAPCSRSTSESTAALGCLVKDYFPEPVTVSWNSGALTSGVHTFPAVLQSSGLYSLSSVVTVPSSSLGTKTYTCNVDHKPSNTKVDKRVESKYGPPCPSCPAPEFLGGPSVFLFPPKPKDTLMISRTPEVTCVVVDVSQEDPEVQFNWYVDGVEVHNAKTKPREEQFNSTYRVVSVLTVLHQDWLNGKEYKCKVSNKGLPSSIEKTISKAKGQPREPQVYTLPPSQEEMTKNQVSLTCLVKGFYPSDIAVEWESNGQPENNYKTTPPVLDSDGSFFLYSRLTVDKSRWQEGNVFSCSVMHEALHNHYTQKSLSLSLGKGGGGSGGGGSGGGGSPGWFLDSPDRPWNPPTFSPALLVVTEGDNATFTCSFSNTSESFVLNWYRMSPSNQTDKLAAFPEDRSQPGQDCRFRVTQLPNGRDFHMSVVRARRNDSGTYLCGAISLAPKAQIKESLRAELRVTERRAEVPTAHPSPSPRPAGQFQTLV

SEQ ID NO: 399 - protein, 350 aa, Artificial Sequence
  Description of Artificial Sequence: Synthetic polypeptide
ETVLTQSPGTLSLSPGERATLSCRASQSLGSSYLAWYQQKPGQAPRLLIYGASSRAPGIPDRFSGSGSGTDFTLTISRLEPEDFAVYYCQQYADSPITFGQGTRLEIKRTVAAPSVFIFPPSDEQLKSGTASVVCLLNNFYPREAKVQWKVDNALQSGNSQESVTEQDSKDSTYSLSSTLTLSKADYEKHKVYACEVTHQGLSSPVTKSFNRGECGGGGSGGGGSGGGGSKESCDVQLYIKRQSEHSILAGDPFELECPVKYCANRPHVTWCKLNGTTCVKLEDRQTSWKEEKNISFFILHFEPVLPNDNGSYRCSANFQSNLIESHSTTLYVTDVKSASERPSKDEMAS

SEQ ID NO: 400 - protein, 992 aa, Artificial Sequence
  Description of Artificial Sequence: Synthetic polypeptide
QVQLVQSGAEVKKPGSSVKVSCKASGYTFSSNVISWVRQAPGQGLEWMGGVIPIVDIANYAQRFKGRVTITADESTSTTYMELSSLRSEDTAVYYCASTLGLVLDAMDYWGQGTLVTVSSASTKGPSVFPLAPCSRSTSESTAALGCLVKDYFPEPVTVSWNSGALTSGVHTFPAVLQSSGLYSLSSVVTVPSSSLGTKTYTCNVDHKPSNTKVDKRVESKYGPPCPSCPAPEFLGGPSVFLFPPKPKDTLMISRTPEVTCVVVDVSQEDPEVQFNWYVDGVEVHNAKTKPREEQFNSTYRVVSVLTVLHQDWLNGKEYKCKVSNKGLPSSIEKTISKAKGQPREPQVYTLPPSQEEMTKNQVSLTCLVKGFYPSDIAVEWESNGQPENNYKTTPPVLDSDGSFFLYSRLTVDKSRWQEGNVFSCSVMHEALHNHYTQKSLSLSLGKGGGGSGGGGSGGGGSMDGRFWIRVQESVMVPEGLCISVPCSFSYPRQDWTGSTPAYGYWFKAVTETTKGAPVATNHQSREVEMSTRGRFQLTGDPAKGNCSLVIRDAQMQDESQYFFRVERGSYVRYNFMNDGFFLKVTALTQKPDVYIPETLEPGQPVTVICVFNWAFEECPPPSFSWTGAALSSQGTKPTTSHFSVLSFTPRPQDHNTDLTCHVDFSRKGVSAQRTVRLRVAYAPRDLVISISRDNTPALEPQPQGNVPYLEAQKGQFLRLLCAADSQPPATLSWVLQNRVLSSSHPWGPRPLGLELPGVKAGDSGRYTCRAENRLGSQQRALDLSVQYPPENLRVMVSQANRTVLENLGNGTSLPVLEGQSLCLVCVTHSSPPARLSWTQRGQVLSPSQPSDPGVLELPRVQVEHEGEFTCHARHPLGSQHVSLSLSVHYSPKLLGPSCSWEAEGLHCSCSSQASPAPSLRWWLGEELLEGNSSQDSFEVTPSSAGPWANSSLSLHGGLSSGLRLRCEAWNVHGAQSGSILQLPDKKGLIST

SEQ ID NO: 401 - protein, 581 aa, Artificial Sequence
  Description of Artificial Sequence: Synthetic polypeptide
QVQLVQSGAEVKKPGSSVKVSCKASGYTFSSNVISWVRQAPGQGLEWMGGVIPIVDIANYAQRFKGRVTITADESTSTTYMELSSLRSEDTAVYYCASTLGLVLDAMDYWGQGTLVTVSSASTKGPSVFPLAPCSRSTSESTAALGCLVKDYFPEPVTVSWNSGALTSGVHTFPAVLQSSGLYSLSSVVTVPSSSLGTKTYTCNVDHKPSNTKVDKRVESKYGPPCPSCPAPEFLGGPSVFLFPPKPKDTLMISRTPEVTCVVVDVSQEDPEVQFNWYVDGVEVHNAKTKPREEQFNSTYRVVSVLTVLHQDWLNGKEYKCKVSNKGLPSSIEKTISKAKGQPREPQVYTLPPSQEEMTKNQVSLTCLVKGFYPSDIAVEWESNGQPENNYKTTPPVLDSDGSFFLYSRLTVDKSRWQEGNVFSCSVMHEALHNHYTQKSLSLSLGKGGGGSGGGGSGGGGSEEELQVIQPDKSVLVAAGETATLRCTATSLIPVGPIQWFRGAGPGRELIYNQKEGHFPRVTTVSDLTKRNNMDFSIRIGNITPADAGTYYCVKFRKGSPDDVEFKSGAGTELSVRAKPS

SEQ ID NO: 402 - protein, 643 aa, Artificial Sequence
  Description of Artificial Sequence: Synthetic polypeptide
QVQLVQSGAEVKKPGSSVKVSCKASGYTFSSNVISWVRQAPGQGLEWMGGVIPIVDIANYAQRFKGRVTITADESTSTTYMELSSLRSEDTAVYYCASTLGLVLDAMDYWGQGTLVTVSSASTKGPSVFPLAPCSRSTSESTAALGCLVKDYFPEPVTVSWNSGALTSGVHTFPAVLQSSGLYSLSSVVTVPSSSLGTKTYTCNVDHKPSNTKVDKRVESKYGPPCPSCPAPEFLGGPSVFLFPPKPKDTLMISRTPEVTCVVVDVSQEDPEVQFNWYVDGVEVHNAKTKPREEQFNSTYRVVSVLTVLHQDWLNGKEYKCKVSNKGLPSSIEKTISKAKGQPREPQVYTLPPSQEEMTKNQVSLTCLVKGFYPSDIAVEWESNGQPENNYKTTPPVLDSDGSFFLYSRLTVDKSRWQEGNVFSCSVMHEALHNHYTQKSLSLSLGKGGGGSGGGGSGGGGSSEVEYRAEVGQNAYLPCFYTPAAPGNLVPVCWGKGACPVFECGNVVLRTDERDVNYWTSRYWLNGDFRKGDVSLTIENVTLADSGIYCCRIQIPGIMNDEKFNLKLVIKPAKVTPAPTRQRDFTAAFPRMLTTRGHGPAETQTLGSLPDINLTQISTLANELRDSRLANDLRDSGATIRIG

SEQ ID NO: 403 - protein, 667 aa, Artificial Sequence
  Description of Artificial Sequence: Synthetic polypeptide
QVQLVQSGAEVKKPGSSVKVSCKASGYTFSSNVISWVRQAPGQGLEWMGGVIPIVDIANYAQRFKGRVTITADESTSTTYMELSSLRSEDTAVYYCASTLGLVLDAMDYWGQGTLVTVSSASTKGPSVFPLAPCSRSTSESTAALGCLVKDYFPEPVTVSWNSGALTSGVHTFPAVLQSSGLYSLSSVVTVPSSSLGTKTYTCNVDHKPSNTKVDKRVESKYGPPCPSCPAPEFLGGPSVFLFPPKPKDTLMISRTPEVTCVVVDVSQEDPEVQFNWYVDGVEVHNAKTKPREEQFNSTYRVVSVLTVLHQDWLNGKEYKCKVSNKGLPSSIEKTISKAKGQPREPQVYTLPPSQEEMTKNQVSLTCLVKGFYPSDIAVEWESNGQPENNYKTTPPVLDSDGSFFLYSRLTVDKSRWQEGNVFSCSVMHEALHNHYTQKSLSLSLGKGGGGSGGGGSGGGGSSDTGRPFVEMYSEIPEIIHMTEGRELVIPCRVTSPNITVTLKKFPLDTLIPDGKRIIWDSRKGFIISNATYKEIGLLTCEATVNGHLYKTNYLTHRQTNTIIDVVLSPSHGIELSVGEKLVLNCTARTELNVGIDFNWEYPSSKHQHKKLVNRDLKTQSGSEMKKFLSTLTIDGVTRSDQGLYTCAASSGLMTKKNSTFVRVHEK

SEQ ID NO: 404 - protein, 583 aa, Artificial Sequence
  Description of Artificial Sequence: Synthetic polypeptide
DVQLQESGPGLVKPSQSLSLTCSVTGYSITSGYYWNWIRQFPGNKLEWMGYISYDGTNNYNPSLKNRISITRDTSKHQFFLKLNSVTTEDTATYYCARSFYNNYFDFWGQGTTLTVSSASTKGPSVFPLAPSSKSTSGGTAALGCLVKDYFPEPVTVSWNSGALTSGVHTFPAVLQSSGLYSLSSVVTVPSSSLGTQTYICNVNHKPSNTKVDKKVEPKSCDKTHTCPPCPAPELLGGPSVFLFPPKPKDTLMISRTPEVTCVVVDVSHEDPEVKFNWYVDGVEVHNAKTKPREEQYNSTYRVVSVLTVLHQDWLNGKEYKCKVSNKALPAPIEKTISKAKGQPREPQVYTLPPSREEMTKNQVSLTCLVKGFYPSDIAVEWESNGQPENNYKTTPPVLDSDGSFFLYSKLTVDKSRWQQGNVFSCSVMHEALHNHYTQKSLSLSPGKGGGGSGGGGSGGGGSKESCDVQLYIKRQSEHSILAGDPFELECPVKYCANRPHVTWCKLNGTTCVKLEDRQTSWKEEKNISFFILHFEPVLPNDNGSYRCSANFQSNLIESHSTTLYVTDVKSASERPSKDEMAS

SEQ ID NO: 405 - protein, 613 aa, Artificial Sequence
  Description of Artificial Sequence: Synthetic polypeptide
DVQLQESGPGLVKPSQSLSLTCSVTGYSITSGYYWNWIRQFPGNKLEWMGYISYDGTNNYNPSLKNRISITRDTSKHQFFLKLNSVTTEDTATYYCARSFYNNYFDFWGQGTTLTVSSASTKGPSVFPLAPSSKSTSGGTAALGCLVKDYFPEPVTVSWNSGALTSGVHTFPAVLQSSGLYSLSSVVTVPSSSLGTQTYICNVNHKPSNTKVDKKVEPKSCDKTHTCPPCPAPELLGGPSVFLFPPKPKDTLMISRTPEVTCVVVDVSHEDPEVKFNWYVDGVEVHNAKTKPREEQYNSTYRVVSVLTVLHQDWLNGKEYKCKVSNKALPAPIEKTISKAKGQPREPQVYTLPPSREEMTKNQVSLTCLVKGFYPSDIAVEWESNGQPENNYKTTPPVLDSDGSFFLYSKLTVDKSRWQQGNVFSCSVMHEALHNHYTQKSLSLSPGKGGGGSGGGGSGGGGSPGWFLDSPDRPWNPPTFSPALLVVTEGDNATFTCSFSNTSESFVLNWYRMSPSNQTDKLAAFPEDRSQPGQDCRFRVTQLPNGRDFHMSVVRARRNDSGTYLCGAISLAPKAQIKESLRAELRVTERRAEVPTAHPSPSPRPAGQFQTLV

SEQ ID NO: 406 - protein, 993 aa, Artificial Sequence
  Description of Artificial Sequence: Synthetic polypeptide
DVQLQESGPGLVKPSQSLSLTCSVTGYSITSGYYWNWIRQFPGNKLEWMGYISYDGTNNYNPSLKNRISITRDTSKHQFFLKLNSVTTEDTATYYCARSFYNNYFDFWGQGTTLTVSSASTKGPSVFPLAPSSKSTSGGTAALGCLVKDYFPEPVTVSWNSGALTSGVHTFPAVLQSSGLYSLSSVVTVPSSSLGTQTYICNVNHKPSNTKVDKKVEPKSCDKTHTCPPCPAPELLGGPSVFLFPPKPKDTLMISRTPEVTCVVVDVSHEDPEVKFNWYVDGVEVHNAKTKPREEQYNSTYRVVSVLTVLHQDWLNGKEYKCKVSNKALPAPIEKTISKAKGQPREPQVYTLPPSREEMTKNQVSLTCLVKGFYPSDIAVEWESNGQPENNYKTTPPVLDSDGSFFLYSKLTVDKSRWQQGNVFSCSVMHEALHNHYTQKSLSLSPGKGGGGSGGGGSGGGGSMDGRFWIRVQESVMVPEGLCISVPCSFSYPRQDWTGSTPAYGYWFKAVTETTKGAPVATNHQSREVEMSTRGRFQLTGDPAKGNCSLVIRDAQMQDESQYFFRVERGSYVRYNFMNDGFFLKVTALTQKPDVYIPETLEPGQPVTVICVFNWAFEECPPPSFSWTGAALSSQGTKPTTSHFSVLSFTPRPQDHNTDLTCHVDFSRKGVSAQRTVRLRVAYAPRDLVISISRDNTPALEPQPQGNVPYLEAQKGQFLRLLCAADSQPPATLSWVLQNRVLSSSHPWGPRPLGLELPGVKAGDSGRYTCRAENRLGSQQRALDLSVQYPPENLRVMVSQANRTVLENLGNGTSLPVLEGQSLCLVCVTHSSPPARLSWTQRGQVLSPSQPSDPGVLELPRVQVEHEGEFTCHARHPLGSQHVSLSLSVHYSPKLLGPSCSWEAEGLHCSCSSQASPAPSLRWWLGEELLEGNSSQDSFEVTPSSAGPWANSSLSLHGGLSSGLRLRCEAWNVHGAQSGSILQLPDKKGLIST

SEQ ID NO: 407 - protein, 582 aa, Artificial Sequence
  Description of Artificial Sequence: Synthetic polypeptide
DVQLQESGPGLVKPSQSLSLTCSVTGYSITSGYYWNWIRQFPGNKLEWMGYISYDGTNNYNPSLKNRISITRDTSKHQFFLKLNSVTTEDTATYYCARSFYNNYFDFWGQGTTLTVSSASTKGPSVFPLAPSSKSTSGGTAALGCLVKDYFPEPVTVSWNSGALTSGVHTFPAVLQSSGLYSLSSVVTVPSSSLGTQTYICNVNHKPSNTKVDKKVEPKSCDKTHTCPPCPAPELLGGPSVFLFPPKPKDTLMISRTPEVTCVVVDVSHEDPEVKFNWYVDGVEVHNAKTKPREEQYNSTYRVVSVLTVLHQDWLNGKEYKCKVSNKALPAPIEKTISKAKGQPREPQVYTLPPSREEMTKNQVSLTCLVKGFYPSDIAVEWESNGQPENNYKTTPPVLDSDGSFFLYSKLTVDKSRWQQGNVFSCSVMHEALHNHYTQKSLSLSPGKGGGGSGGGGSGGGGSEEELQVIQPDKSVLVAAGETATLRCTATSLIPVGPIQWFRGAGPGRELIYNQKEGHFPRVTTVSDLTKRNNMDFSIRIGNITPADAGTYYCVKFRKGSPDDVEFKSGAGTELSVRAKPS

SEQ ID NO: 408 - protein, 644 aa, Artificial Sequence
  Description of Artificial Sequence: Synthetic polypeptide
DVQLQESGPGLVKPSQSLSLTCSVTGYSITSGYYWNWIRQFPGNKLEWMGYISYDGTNNYNPSLKNRISITRDTSKHQFFLKLNSVTTEDTATYYCARSFYNNYFDFWGQGTTLTVSSASTKGPSVFPLAPSSKSTSGGTAALGCLVKDYFPEPVTVSWNSGALTSGVHTFPAVLQSSGLYSLSSVVTVPSSSLGTQTYICNVNHKPSNTKVDKKVEPKSCDKTHTCPPCPAPELLGGPSVFLFPPKPKDTLMISRTPEVTCVVVDVSHEDPEVKFNWYVDGVEVHNAKTKPREEQYNSTYRVVSVLTVLHQDWLNGKEYKCKVSNKALPAPIEKTISKAKGQPREPQVYTLPPSREEMTKNQVSLTCLVKGFYPSDIAVEWESNGQPENNYKTTPPVLDSDGSFFLYSKLTVDKSRWQQGNVFSCSVMHEALHNHYTQKSLSLSPGKGGGGSGGGGSGGGGSSEVEYRAEVGQNAYLPCFYTPAAPGNLVPVCWGKGACPVFECGNVVLRTDERDVNYWTSRYWLNGDFRKGDVSLTIENVTLADSGIYCCRIQIPGIMNDEKFNLKLVIKPAKVTPAPTRQRDFTAAFPRMLTTRGHGPAETQTLGSLPDINLTQISTLANELRDSRLANDLRDSGATIRIG

SEQ ID NO: 409 - protein, 668 aa, Artificial Sequence
  Description of Artificial Sequence: Synthetic polypeptide
DVQLQESGPGLVKPSQSLSLTCSVTGYSITSGYYWNWIRQFPGNKLEWMGYISYDGTNNYNPSLKNRISITRDTSKHQFFLKLNSVTTEDTATYYCARSFYNNYFDFWGQGTTLTVSSASTKGPSVFPLAPSSKSTSGGTAALGCLVKDYFPEPVTVSWNSGALTSGVHTFPAVLQSSGLYSLSSVVTVPSSSLGTQTYICNVNHKPSNTKVDKKVEPKSCDKTHTCPPCPAPELLGGPSVFLFPPKPKDTLMISRTPEVTCVVVDVSHEDPEVKFNWYVDGVEVHNAKTKPREEQYNSTYRVVSVLTVLHQDWLNGKEYKCKVSNKALPAPIEKTISKAKGQPREPQVYTLPPSREEMTKNQVSLTCLVKGFYPSDIAVEWESNGQPENNYKTTPPVLDSDGSFFLYSKLTVDKSRWQQGNVFSCSVMHEALHNHYTQKSLSLSPGKGGGGSGGGGSGGGGSSDTGRPFVEMYSEIPEIIHMTEGRELVIPCRVTSPNITVTLKKFPLDTLIPDGKRIIWDSRKGFIISNATYKEIGLLTCEATVNGHLYKTNYLTHRQTNTIIDVVLSPSHGIELSVGEKLVLNCTARTELNVGIDFNWEYPSSKHQHKKLVNRDLKTQSGSEMKKFLSTLTIDGVTRSDQGLYTCAASSGLMTKKNSTFVRVHEK

SEQ ID NO: 410 - protein, 587 aa, Artificial Sequence
  Description of Artificial Sequence: Synthetic polypeptide
QVQLVQPGAEVRKPGASVKVSCKASGYRFTSYYIDWVRQAPGQGLEWMGRIDPEDAGTKYAQKFQGRVTMTADTSTSTVYVELSSLRSEDTAVYYCARYEWETVVVGDLMYEYEYWGQGTLVTVSSASTKGPSVFPLAPCSRSTSESTAALGCLVKDYFPEPVTVSWNSGALTSGVHTFPAVLQSSGLYSLSSVVTVPSSSLGTKTYTCNVDHKPSNTKVDKRVESKYGPPCPPCPAPEFLGGPSVFLFPPKPKDTLMISRTPEVTCVVVDVSQEDPEVQFNWYVDGVEVHNAKTKPREEQFNSTYRVVSVLTVLHQDWLNGKEYKCKVSNKGLPSSIEKTISKAKGQPREPQVYTLPPSQEEMTKNQVSLTCLVKGFYPSDIAVEWESNGQPENNYKTTPPVLDSDGSFFLYSRLTVDKSRWQEGNVFSCSVMHEALHNHYTQKSLSLSLGGGGGSGGGGSGGGGSKESCDVQLYIKRQSEHSILAGDPFELECPVKYCANRPHVTWCKLNGTTCVKLEDRQTSWKEEKNISFFILHFEPVLPNDNGSYRCSANFQSNLIESHSTTLYVTDVKSASERPSKDEMAS

SEQ ID NO: 411 - protein, 617 aa, Artificial Sequence
  Description of Artificial Sequence: Synthetic polypeptide
QVQLVQPGAEVRKPGASVKVSCKASGYRFTSYYIDWVRQAPGQGLEWMGRIDPEDAGTKYAQKFQGRVTMTADTSTSTVYVELSSLRSEDTAVYYCARYEWETVVVGDLMYEYEYWGQGTLVTVSSASTKGPSVFPLAPCSRSTSESTAALGCLVKDYFPEPVTVSWNSGALTSGVHTFPAVLQSSGLYSLSSVVTVPSSSLGTKTYTCNVDHKPSNTKVDKRVESKYGPPCPPCPAPEFLGGPSVFLFPPKPKDTLMISRTPEVTCVVVDVSQEDPEVQFNWYVDGVEVHNAKTKPREEQFNSTYRVVSVLTVLHQDWLNGKEYKCKVSNKGLPSSIEKTISKAKGQPREPQVYTLPPSQEEMTKNQVSLTCLVKGFYPSDIAVEWESNGQPENNYKTTPPVLDSDGSFFLYSRLTVDKSRWQEGNVFSCSVMHEALHNHYTQKSLSLSLGGGGGSGGGGSGGGGSPGWFLDSPDRPWNPPTFSPALLVVTEGDNATFTCSFSNTSESFVLNWYRMSPSNQTDKLAAFPEDRSQPGQDCRFRVTQLPNGRDFHMSVVRARRNDSGTYLCGAISLAPKAQIKESLRAELRVTERRAEVPTAHPSPSPRPAGQFQTLV

SEQ ID NO: 412 - protein, 997 aa, Artificial Sequence
  Description of Artificial Sequence: Synthetic polypeptide
QVQLVQPGAEVRKPGASVKVSCKASGYRFTSYYIDWVRQAPGQGLEWMGRIDPEDAGTKYAQKFQGRVTMTADTSTSTVYVELSSLRSEDTAVYYCARYEWETVVVGDLMYEYEYWGQGTLVTVSSASTKGPSVFPLAPCSRSTSESTAALGCLVKDYFPEPVTVSWNSGALTSGVHTFPAVLQSSGLYSLSSVVTVPSSSLGTKTYTCNVDHKPSNTKVDKRVESKYGPPCPPCPAPEFLGGPSVFLFPPKPKDTLMISRTPEVTCVVVDVSQEDPEVQFNWYVDGVEVHNAKTKPREEQFNSTYRVVSVLTVLHQDWLNGKEYKCKVSNKGLPSSIEKTISKAKGQPREPQVYTLPPSQEEMTKNQVSLTCLVKGFYPSDIAVEWESNGQPENNYKTTPPVLDSDGSFFLYSRLTVDKSRWQEGNVFSCSVMHEALHNHYTQKSLSLSLGGGGGSGGGGSGGGGSMDGRFWIRVQESVMVPEGLCISVPCSFSYPRQDWTGSTPAYGYWFKAVTETTKGAPVATNHQSREVEMSTRGRFQLTGDPAKGNCSLVIRDAQMQDESQYFFRVERGSYVRYNFMNDGFFLKVTALTQKPDVYIPETLEPGQPVTVICVFNWAFEECPPPSFSWTGAALSSQGTKPTTSHFSVLSFTPRPQDHNTDLTCHVDFSRKGVSAQRTVRLRVAYAPRDLVISISRDNTPALEPQPQGNVPYLEAQKGQFLRLLCAADSQPPATLSWVLQNRVLSSSHPWGPRPLGLELPGVKAGDSGRYTCRAENRLGSQQRALDLSVQYPPENLRVMVSQANRTVLENLGNGTSLPVLEGQSLCLVCVTHSSPPARLSWTQRGQVLSPSQPSDPGVLELPRVQVEHEGEFTCHARHPLGSQHVSLSLSVHYSPKLLGPSCSWEAEGLHCSCSSQASPAPSLRWWLGEELLEGNSSQDSFEVTPSSAGPWANSSLSLHGGLSSGLRLRCEAWNVHGAQSGSILQLPDKKGLIST

SEQ ID NO: 413 - protein, 586 aa, Artificial Sequence
  Description of Artificial Sequence: Synthetic polypeptide
QVQLVQPGAEVRKPGASVKVSCKASGYRFTSYYIDWVRQAPGQGLEWMGRIDPEDAGTKYAQKFQGRVTMTADTSTSTVYVELSSLRSEDTAVYYCARYEWETVVVGDLMYEYEYWGQGTLVTVSSASTKGPSVFPLAPCSRSTSESTAALGCLVKDYFPEPVTVSWNSGALTSGVHTFPAVLQSSGLYSLSSVVTVPSSSLGTKTYTCNVDHKPSNTKVDKRVESKYGPPCPPCPAPEFLGGPSVFLFPPKPKDTLMISRTPEVTCVVVDVSQEDPEVQFNWYVDGVEVHNAKTKPREEQFNSTYRVVSVLTVLHQDWLNGKEYKCKVSNKGLPSSIEKTISKAKGQPREPQVYTLPPSQEEMTKNQVSLTCLVKGFYPSDIAVEWESNGQPENNYKTTPPVLDSDGSFFLYSRLTVDKSRWQEGNVFSCSVMHEALHNHYTQKSLSLSLGGGGGSGGGGSGGGGSEEELQVIQPDKSVLVAAGETATLRCTATSLIPVGPIQWFRGAGPGRELIYNQKEGHFPRVTTVSDLTKRNNMDFSIRIGNITPADAGTYYCVKFRKGSPDDVEFKSGAGTELSVRAKPS

SEQ ID NO: 414 - protein, 648 aa, Artificial Sequence
  Description of Artificial Sequence: Synthetic polypeptide
QVQLVQPGAEVRKPGASVKVSCKASGYRFTSYYIDWVRQAPGQGLEWMGRIDPEDAGTKYAQKFQGRVTMTADTSTSTVYVELSSLRSEDTAVYYCARYEWETVVVGDLMYEYEYWGQGTLVTVSSASTKGPSVFPLAPCSRSTSESTAALGCLVKDYFPEPVTVSWNSGALTSGVHTFPAVLQSSGLYSLSSVVTVPSSSLGTKTYTCNVDHKPSNTKVDKRVESKYGPPCPPCPAPEFLGGPSVFLFPPKPKDTLMISRTPEVTCVVVDVSQEDPEVQFNWYVDGVEVHNAKTKPREEQFNSTYRVVSVLTVLHQDWLNGKEYKCKVSNKGLPSSIEKTISKAKGQPREPQVYTLPPSQEEMTKNQVSLTCLVKGFYPSDIAVEWESNGQPENNYKTTPPVLDSDGSFFLYSRLTVDKSRWQEGNVFSCSVMHEALHNHYTQKSLSLSLGGGGGSGGGGSGGGGSSEVEYRAEVGQNAYLPCFYTPAAPGNLVPVCWGKGACPVFECGNVVLRTDERDVNYWTSRYWLNGDFRKGDVSLTIENVTLADSGIYCCRIQIPGIMNDEKFNLKLVIKPAKVTPAPTRQRDFTAAFPRMLTTRGHGPAETQTLGSLPDINLTQISTLANELRDSRLANDLRDSGATIRIG

SEQ ID NO: 415 - protein, 672 aa, Artificial Sequence
  Description of Artificial Sequence: Synthetic polypeptide
QVQLVQPGAEVRKPGASVKVSCKASGYRFTSYYIDWVRQAPGQGLEWMGRIDPEDAGTKYAQKFQGRVTMTADTSTSTVYVELSSLRSEDTAVYYCARYEWETVVVGDLMYEYEYWGQGTLVTVSSASTKGPSVFPLAPCSRSTSESTAALGCLVKDYFPEPVTVSWNSGALTSGVHTFPAVLQSSGLYSLSSVVTVPSSSLGTKTYTCNVDHKPSNTKVDKRVESKYGPPCPPCPAPEFLGGPSVFLFPPKPKDTLMISRTPEVTCVVVDVSQEDPEVQFNWYVDGVEVHNAKTKPREEQFNSTYRVVSVLTVLHQDWLNGKEYKCKVSNKGLPSSIEKTISKAKGQPREPQVYTLPPSQEEMTKNQVSLTCLVKGFYPSDIAVEWESNGQPENNYKTTPPVLDSDGSFFLYSRLTVDKSRWQEGNVFSCSVMHEALHNHYTQKSLSLSLGGGGGSGGGGSGGGGSSDTGRPFVEMYSEIPEIIHMTEGRELVIPCRVTSPNITVTLKKFPLDTLIPDGKRIIWDSRKGFIISNATYKEIGLLTCEATVNGHLYKTNYLTHRQTNTIIDVVLSPSHGIELSVGEKLVLNCTARTELNVGIDFNWEYPSSKHQHKKLVNRDLKTQSGSEMKKFLSTLTIDGVTRSDQGLYTCAASSGLMTKKNSTFVRVHEK

SEQ ID NO: 416 - protein, 582 aa, Artificial Sequence
  Description of Artificial Sequence: Synthetic polypeptide
EVQLVQSGAEVKKPGESLKISCKASGYAFSSSWINWVRQMPGKGLEWMGRIYPRAGDTNYAGKFKDQVTISADKSISTAYLQWSSLKASDTAMYYCASLLDYSMDYWGQGTLVTVSSASTKGPSVFPLAPSSKSTSGGTAALGCLVKDYFPEPVTVSWNSGALTSGVHTFPAVLQSSGLYSLSSVVTVPSSSLGTQTYICNVNHKPSNTKVDKKVEPKSCDKTHTCPPCPAPELLGGPSVFLFPPKPKDTLMISRTPEVTCVVVDVSHEDPEVKFNWYVDGVEVHNAKTKPREEQYNSTYRVVSVLTVLHQDWLNGKEYKCKVSNKALPAPIEKTISKAKGQPREPQVYTLPPSREEMTKNQVSLTCLVKGFYPSDIAVEWESNGQPENNYKTTPPVLDSDGSFFLYSKLTVDKSRWQQGNVFSCSVMHEALHNHYTQKSLSLSPGKGGGGSGGGGSGGGGSKESCDVQLYIKRQSEHSILAGDPFELECPVKYCANRPHVTWCKLNGTTCVKLEDRQTSWKEEKNISFFILHFEPVLPNDNGSYRCSANFQSNLIESHSTTLYVTDVKSASERPSKDEMAS

SEQ ID NO: 417 - protein, 379 aa, Artificial Sequence
  Description of Artificial Sequence: Synthetic polypeptide
DIQMTQSPSSLSASVGDRVTITCRASQDISNYLNWYQQKPGKAPKLLIYYTSRLHSGVPSRFSGSGSGTDFTFTISSLQPEDIATYYCQQGNTLPLTFGQGTKVEIKRTVAAPSVFIFPPSDEQLKSGTASVVCLLNNFYPREAKVQWKVDNALQSGNSQESVTEQDSKDSTYSLSSTLTLSKADYEKHKVYACEVTHQGLSSPVTKSFNRGECGGGGSGGGGSGGGGSPGWFLDSPDRPWNPPTFSPALLVVTEGDNATFTCSFSNTSESFVLNWYRMSPSNQTDKLAAFPEDRSQPGQDCRFRVTQLPNGRDFHMSVVRARRNDSGTYLCGAISLAPKAQIKESLRAELRVTERRAEVPTAHPSPSPRPAGQFQTLV

SEQ ID NO: 418 - protein, 759 aa, Artificial Sequence
  Description of Artificial Sequence: Synthetic polypeptide
DIQMTQSPSSLSASVGDRVTITCRASQDISNYLNWYQQKPGKAPKLLIYYTSRLHSGVPSRFSGSGSGTDFTFTISSLQPEDIATYYCQQGNTLPLTFGQGTKVEIKRTVAAPSVFIFPPSDEQLKSGTASVVCLLNNFYPREAKVQWKVDNALQSGNSQESVTEQDSKDSTYSLSSTLTLSKADYEKHKVYACEVTHQGLSSPVTKSFNRGECGGGGSGGGGSGGGGSMDGRFWIRVQESVMVPEGLCISVPCSFSYPRQDWTGSTPAYGYWFKAVTETTKGAPVATNHQSREVEMSTRGRFQLTGDPAKGNCSLVIRDAQMQDESQYFFRVERGSYVRYNFMNDGFFLKVTALTQKPDVYIPETLEPGQPVTVICVFNWAFEECPPPSFSWTGAALSSQGTKPTTSHFSVLSFTPRPQDHNTDLTCHVDFSRKGVSAQRTVRLRVAYAPRDLVISISRDNTPALEPQPQGNVPYLEAQKGQFLRLLCAADSQPPATLSWVLQNRVLSSSHPWGPRPLGLELPGVKAGDSGRYTCRAENRLGSQQRALDLSVQYPPENLRVMVSQANRTVLENLGNGTSLPVLEGQSLCLVCVTHSSPPARLSWTQRGQVLSPSQPSDPGVLELPRVQVEHEGEFTCHARHPLGSQHVSLSLSVHYSPKLLGPSCSWEAEGLHCSCSSQASPAPSLRWWLGEELLEGNSSQDSFEVTPSSAGPWANSSLSLHGGLSSGLRLRCEAWNVHGAQSGSILQLPDKKGLIST

SEQ ID NO: 419 - protein, 348 aa, Artificial Sequence
  Description of Artificial Sequence: Synthetic polypeptide
DIQMTQSPSSLSASVGDRVTITCRASQDISNYLNWYQQKPGKAPKLLIYYTSRLHSGVPSRFSGSGSGTDFTFTISSLQPEDIATYYCQQGNTLPLTFGQGTKVEIKRTVAAPSVFIFPPSDEQLKSGTASVVCLLNNFYPREAKVQWKVDNALQSGNSQESVTEQDSKDSTYSLSSTLTLSKADYEKHKVYACEVTHQGLSSPVTKSFNRGECGGGGSGGGGSGGGGSEEELQVIQPDKSVLVAAGETATLRCTATSLIPVGPIQWFRGAGPGRELIYNQKEGHFPRVTTVSDLTKRNNMDFSIRIGNITPADAGTYYCVKFRKGSPDDVEFKSGAGTELSVRAKPS

SEQ ID NO: 420 - protein, 410 aa, Artificial Sequence
  Description of Artificial Sequence: Synthetic polypeptide
DIQMTQSPSSLSASVGDRVTITCRASQDISNYLNWYQQKPGKAPKLLIYYTSRLHSGVPSRFSGSGSGTDFTFTISSLQPEDIATYYCQQGNTLPLTFGQGTKVEIKRTVAAPSVFIFPPSDEQLKSGTASVVCLLNNFYPREAKVQWKVDNALQSGNSQESVTEQDSKDSTYSLSSTLTLSKADYEKHKVYACEVTHQGLSSPVTKSFNRGECGGGGSGGGGSGGGGSSEVEYRAEVGQNAYLPCFYTPAAPGNLVPVCWGKGACPVFECGNVVLRTDERDVNYWTSRYWLNGDFRKGDVSLTIENVTLADSGIYCCRIQIPGIMNDEKFNLKLVIKPAKVTPAPTRQRDFTAAFPRMLTTRGHGPAETQTLGSLPDINLTQISTLANELRDSRLANDLRDSGATIRIG

SEQ ID NO: 421 - protein, 612 aa, Artificial Sequence
  Description of Artificial Sequence: Synthetic polypeptide
EVQLVQSGAEVKKPGESLKISCKASGYAFSSSWINWVRQMPGKGLEWMGRIYPRAGDTNYAGKFKDQVTISADKSISTAYLQWSSLKASDTAMYYCASLLDYSMDYWGQGTLVTVSSASTKGPSVFPLAPSSKSTSGGTAALGCLVKDYFPEPVTVSWNSGALTSGVHTFPAVLQSSGLYSLSSVVTVPSSSLGTQTYICNVNHKPSNTKVDKKVEPKSCDKTHTCPPCPAPELLGGPSVFLFPPKPKDTLMISRTPEVTCVVVDVSHEDPEVKFNWYVDGVEVHNAKTKPREEQYNSTYRVVSVLTVLHQDWLNGKEYKCKVSNKALPAPIEKTISKAKGQPREPQVYTLPPSREEMTKNQVSLTCLVKGFYPSDIAVEWESNGQPENNYKTTPPVLDSDGSFFLYSKLTVDKSRWQQGNVFSCSVMHEALHNHYTQKSLSLSPGKGGGGSGGGGSGGGGSPGWFLDSPDRPWNPPTFSPALLVVTEGDNATFTCSFSNTSESFVLNWYRMSPSNQTDKLAAFPEDRSQPGQDCRFRVTQLPNGRDFHMSVVRARRNDSGTYLCGAISLAPKAQIKESLRAELRVTERRAEVPTAHPSPSPRPAGQFQTLV

SEQ ID NO: 422 - protein, 349 aa, Artificial Sequence
  Description of Artificial Sequence: Synthetic polypeptide
DIQMTQSPSSLSASVGDRVTITCRASQDISNYLNWYQQKPGKAPKLLIYYTSRLHSGVPSRFSGSGSGTDFTFTISSLQPEDIATYYCQQGNTLPLTFGQGTKVEIKRTVAAPSVFIFPPSDEQLKSGTASVVCLLNNFYPREAKVQWKVDNALQSGNSQESVTEQDSKDSTYSLSSTLTLSKADYEKHKVYACEVTHQGLSSPVTKSFNRGECGGGGSGGGGSGGGGSKESCDVQLYIKRQSEHSILAGDPFELECPVKYCANRPHVTWCKLNGTTCVKLEDRQTSWKEEKNISFFILHFEPVLPNDNGSYRCSANFQSNLIESHSTTLYVTDVKSASERPSKDEMAS

SEQ ID NO: 423 - protein, 992 aa, Artificial Sequence
  Description of Artificial Sequence: Synthetic polypeptide
EVQLVQSGAEVKKPGESLKISCKASGYAFSSSWINWVRQMPGKGLEWMGRIYPRAGDTNYAGKFKDQVTISADKSISTAYLQWSSLKASDTAMYYCASLLDYSMDYWGQGTLVTVSSASTKGPSVFPLAPSSKSTSGGTAALGCLVKDYFPEPVTVSWNSGALTSGVHTFPAVLQSSGLYSLSSVVTVPSSSLGTQTYICNVNHKPSNTKVDKKVEPKSCDKTHTCPPCPAPELLGGPSVFLFPPKPKDTLMISRTPEVTCVVVDVSHEDPEVKFNWYVDGVEVHNAKTKPREEQYNSTYRVVSVLTVLHQDWLNGKEYKCKVSNKALPAPIEKTISKAKGQPREPQVYTLPPSREEMTKNQVSLTCLVKGFYPSDIAVEWESNGQPENNYKTTPPVLDSDGSFFLYSKLTVDKSRWQQGNVFSCSVMHEALHNHYTQKSLSLSPGKGGGGSGGGGSGGGGSMDGRFWIRVQESVMVPEGLCISVPCSFSYPRQDWTGSTPAYGYWFKAVTETTKGAPVATNHQSREVEMSTRGRFQLTGDPAKGNCSLVIRDAQMQDESQYFFRVERGSYVRYNFMNDGFFLKVTALTQKPDVYIPETLEPGQPVTVICVFNWAFEECPPPSFSWTGAALSSQGTKPTTSHFSVLSFTPRPQDHNTDLTCHVDFSRKGVSAQRTVRLRVAYAPRDLVISISRDNTPALEPQPQGNVPYLEAQKGQFLRLLCAADSQPPATLSWVLQNRVLSSSHPWGPRPLGLELPGVKAGDSGRYTCRAENRLGSQQRALDLSVQYPPENLRVMVSQANRTVLENLGNGTSLPVLEGQSLCLVCVTHSSPPARLSWTQRGQVLSPSQPSDPGVLELPRVQVEHEGEFTCHARHPLGSQHVSLSLSVHYSPKLLGPSCSWEAEGLHCSCSSQASPAPSLRWWLGEELLEGNSSQDSFEVTPSSAGPWANSSLSLHGGLSSGLRLRCEAWNVHGAQSGSILQLPDKKGLIST

SEQ ID NO: 424 - protein, 581 aa, Artificial Sequence
  Description of Artificial Sequence: Synthetic polypeptide
EVQLVQSGAEVKKPGESLKISCKASGYAFSSSWINWVRQMPGKGLEWMGRIYPRAGDTNYAGKFKDQVTISADKSISTAYLQWSSLKASDTAMYYCASLLDYSMDYWGQGTLVTVSSASTKGPSVFPLAPSSKSTSGGTAALGCLVKDYFPEPVTVSWNSGALTSGVHTFPAVLQSSGLYSLSSVVTVPSSSLGTQTYICNVNHKPSNTKVDKKVEPKSCDKTHTCPPCPAPELLGGPSVFLFPPKPKDTLMISRTPEVTCVVVDVSHEDPEVKFNWYVDGVEVHNAKTKPREEQYNSTYRVVSVLTVLHQDWLNGKEYKCKVSNKALPAPIEKTISKAKGQPREPQVYTLPPSREEMTKNQVSLTCLVKGFYPSDIAVEWESNGQPENNYKTTPPVLDSDGSFFLYSKLTVDKSRWQQGNVFSCSVMHEALHNHYTQKSLSLSPGKGGGGSGGGGSGGGGSEEELQVIQPDKSVLVAAGETATLRCTATSLIPVGPIQWFRGAGPGRELIYNQKEGHFPRVTTVSDLTKRNNMDFSIRIGNITPADAGTYYCVKFRKGSPDDVEFKSGAGTELSVRAKPS

SEQ ID NO: 425 - protein, 599 aa, Artificial Sequence
  Description of Artificial Sequence: Synthetic polypeptide
EVQLVQSGAEVKKPGESLKISCKASGYAFSSSWINWVRQMPGKGLEWMGRIYPRAGDTNYAGKFKDQVTISADKSISTAYLQWSSLKASDTAMYYCASLLDYSMDYWGQGTLVTVSSASTKGPSVFPLAPSSKSTSGGTAALGCLVKDYFPEPVTVSWNSGALTSGVHTFPAVLQSSGLYSLSSVVTVPSSSLGTQTYICNVNHKPSNTKVDKKVEPKSCDKTHTCPPCPAPELLGGPSVFLFPPKPKDTLMISRTPEVTCVVVDVSHEDPEVKFNWYVDGVEVHNAKTKPREEQYNSTYRVVSVLTVLHQDWLNGKEYKCKVSNKALPAPIEKTISKAKGQPREPQVYTLPPSREEMTKNQVSLTCLVKGFYPSDIAVEWESNGQPENNYKTTPPVLDSDGSFFLYSKLTVDKSRWQQGNVFSCSVMHEALHNHYTQKSLSLSPGKGGGGSGGGGSGGGGSTIPPHVQKSVNNDMIVTDNNGAVKFPQLCKFCDVRFSTCDNQKSCMSNCSITSICEKPQEVCVAVWRKNDENITLETVCHDPKLPYHDFILEDAASPKCIMKEKKKPGETFFMCSCSSDECNDNIIFSEEYNTSNPD

SEQ ID NO: 426 - protein, 643 aa, Artificial Sequence
  Description of Artificial Sequence: Synthetic polypeptide
EVQLVQSGAEVKKPGESLKISCKASGYAFSSSWINWVRQMPGKGLEWMGRIYPRAGDTNYAGKFKDQVTISADKSISTAYLQWSSLKASDTAMYYCASLLDYSMDYWGQGTLVTVSSASTKGPSVFPLAPSSKSTSGGTAALGCLVKDYFPEPVTVSWNSGALTSGVHTFPAVLQSSGLYSLSSVVTVPSSSLGTQTYICNVNHKPSNTKVDKKVEPKSCDKTHTCPPCPAPELLGGPSVFLFPPKPKDTLMISRTPEVTCVVVDVSHEDPEVKFNWYVDGVEVHNAKTKPREEQYNSTYRVVSVLTVLHQDWLNGKEYKCKVSNKALPAPIEKTISKAKGQPREPQVYTLPPSREEMTKNQVSLTCLVKGFYPSDIAVEWESNGQPENNYKTTPPVLDSDGSFFLYSKLTVDKSRWQQGNVFSCSVMHEALHNHYTQKSLSLSPGKGGGGSGGGGSGGGGSSEVEYRAEVGQNAYLPCFYTPAAPGNLVPVCWGKGACPVFECGNVVLRTDERDVNYWTSRYWLNGDFRKGDVSLTIENVTLADSGIYCCRIQIPGIMNDEKFNLKLVIKPAKVTPAPTRQRDFTAAFPRMLTTRGHGPAETQTLGSLPDINLTQISTLANELRDSRLANDLRDSGATIRIG

SEQ ID NO: 427 - protein, 667 aa, Artificial Sequence
  Description of Artificial Sequence: Synthetic polypeptide
EVQLVQSGAEVKKPGESLKISCKASGYAFSSSWINWVRQMPGKGLEWMGRIYPRAGDTNYAGKFKDQVTISADKSISTAYLQWSSLKASDTAMYYCASLLDYSMDYWGQGTLVTVSSASTKGPSVFPLAPSSKSTSGGTAALGCLVKDYFPEPVTVSWNSGALTSGVHTFPAVLQSSGLYSLSSVVTVPSSSLGTQTYICNVNHKPSNTKVDKKVEPKSCDKTHTCPPCPAPELLGGPSVFLFPPKPKDTLMISRTPEVTCVVVDVSHEDPEVKFNWYVDGVEVHNAKTKPREEQYNSTYRVVSVLTVLHQDWLNGKEYKCKVSNKALPAPIEKTISKAKGQPREPQVYTLPPSREEMTKNQVSLTCLVKGFYPSDIAVEWESNGQPENNYKTTPPVLDSDGSFFLYSKLTVDKSRWQQGNVFSCSVMHEALHNHYTQKSLSLSPGKGGGGSGGGGSGGGGSSDTGRPFVEMYSEIPEIIHMTEGRELVIPCRVTSPNITVTLKKFPLDTLIPDGKRIIWDSRKGFIISNATYKEIGLLTCEATVNGHLYKTNYLTHRQTNTIIDVVLSPSHGIELSVGEKLVLNCTARTELNVGIDFNWEYPSSKHQHKKLVNRDLKTQSGSEMKKFLSTLTIDGVTRSDQGLYTCAASSGLMTKKNSTFVRVHEK

SEQ ID NO: 428 - protein, 588 aa, Artificial Sequence
  Description of Artificial Sequence: Synthetic polypeptide
QVQLVQSGSELKKPGASVKVSCKASGYTFTHYGMNWVRQAPGQGLKWMGWINTYTGEPTYADDFKGRFVFSLDTSVSTAYLQISSLKAEDTAVYYCARRRYEGNYVFYYFDYWGQGTTVTVSSASTKGPSVFPLAPSSKSTSGGTAALGCLVKDYFPEPVTVSWNSGALTSGVHTFPAVLQSSGLYSLSSVVTVPSSSLGTQTYICNVNHKPSNTKVDKKVEPKSCDKTHTCPPCPAPELLGGPSVFLFPPKPKDTLMISRTPEVTCVVVDVSHEDPEVKFNWYVDGVEVHNAKTKPREEQYNSTYRVVSVLTVLHQDWLNGKEYKCKVSNKALPAPIEKTISKAKGQPREPQVYTLPPSREEMTKNQVSLTCLVKGFYPSDIAVEWESNGQPENNYKTTPPVLDSDGSFFLYSKLTVDKSRWQQGNVFSCSVMHEALHNHYTQKSLSLSPGKGGGGSGGGGSGGGGSKESCDVQLYIKRQSEHSILAGDPFELECPVKYCANRPHVTWCKLNGTTCVKLEDRQTSWKEEKNISFFILHFEPVLPNDNGSYRCSANFQSNLIESHSTTLYVTDVKSASERPSKDEMAS

SEQ ID NO: 429 - protein, 618 aa, Artificial Sequence
  Description of Artificial Sequence: Synthetic polypeptide
QVQLVQSGSELKKPGASVKVSCKASGYTFTHYGMNWVRQAPGQGLKWMGWINTYTGEPTYADDFKGRFVFSLDTSVSTAYLQISSLKAEDTAVYYCARRRYEGNYVFYYFDYWGQGTTVTVSSASTKGPSVFPLAPSSKSTSGGTAALGCLVKDYFPEPVTVSWNSGALTSGVHTFPAVLQSSGLYSLSSVVTVPSSSLGTQTYICNVNHKPSNTKVDKKVEPKSCDKTHTCPPCPAPELLGGPSVFLFPPKPKDTLMISRTPEVTCVVVDVSHEDPEVKFNWYVDGVEVHNAKTKPREEQYNSTYRVVSVLTVLHQDWLNGKEYKCKVSNKALPAPIEKTISKAKGQPREPQVYTLPPSREEMTKNQVSLTCLVKGFYPSDIAVEWESNGQPENNYKTTPPVLDSDGSFFLYSKLTVDKSRWQQGNVFSCSVMHEALHNHYTQKSLSLSPGKGGGGSGGGGSGGGGSPGWFLDSPDRPWNPPTFSPALLVVTEGDNATFTCSFSNTSESFVLNWYRMSPSNQTDKLAAFPEDRSQPGQDCRFRVTQLPNGRDFHMSVVRARRNDSGTYLCGAISLAPKAQIKESLRAELRVTERRAEVPTAHPSPSPRPAGQFQTLV

SEQ ID NO: 430 - protein, 998 aa, Artificial Sequence
  Description of Artificial Sequence: Synthetic polypeptide
QVQLVQSGSELKKPGASVKVSCKASGYTFTHYGMNWVRQAPGQGLKWMGWINTYTGEPTYADDFKGRFVFSLDTSVSTAYLQISSLKAEDTAVYYCARRRYEGNYVFYYFDYWGQGTTVTVSSASTKGPSVFPLAPSSKSTSGGTAALGCLVKDYFPEPVTVSWNSGALTSGVHTFPAVLQSSGLYSLSSVVTVPSSSLGTQTYICNVNHKPSNTKVDKKVEPKSCDKTHTCPPCPAPELLGGPSVFLFPPKPKDTLMISRTPEVTCVVVDVSHEDPEVKFNWYVDGVEVHNAKTKPREEQYNSTYRVVSVLTVLHQDWLNGKEYKCKVSNKALPAPIEKTISKAKGQPREPQVYTLPPSREEMTKNQVSLTCLVKGFYPSDIAVEWESNGQPENNYKTTPPVLDSDGSFFLYSKLTVDKSRWQQGNVFSCSVMHEALHNHYTQKSLSLSPGKGGGGSGGGGSGGGGSMDGRFWIRVQESVMVPEGLCISVPCSFSYPRQDWTGSTPAYGYWFKAVTETTKGAPVATNHQSREVEMSTRGRFQLTGDPAKGNCSLVIRDAQMQDESQYFFRVERGSYVRYNFMNDGFFLKVTALTQKPDVYIPETLEPGQPVTVICVFNWAFEECPPPSFSWTGAALSSQGTKPTTSHFSVLSFTPRPQDHNTDLTCHVDFSRKGVSAQRTVRLRVAYAPRDLVISISRDNTPALEPQPQGNVPYLEAQKGQFLRLLCAADSQPPATLSWVLQNRVLSSSHPWGPRPLGLELPGVKAGDSGRYTCRAENRLGSQQRALDLSVQYPPENLRVMVSQANRTVLENLGNGTSLPVLEGQSLCLVCVTHSSPPARLSWTQRGQVLSPSQPSDPGVLELPRVQVEHEGEFTCHARHPLGSQHVSLSLSVHYSPKLLGPSCSWEAEGLHCSCSSQASPAPSLRWWLGEELLEGNSSQDSFEVTPSSAGPWANSSLSLHGGLSSGLRLRCEAWNVHGAQSGSILQLPDKKGLIST

SEQ ID NO: 431 - protein, 587 aa, Artificial Sequence
  Description of Artificial Sequence: Synthetic polypeptide
QVQLVQSGSELKKPGASVKVSCKASGYTFTHYGMNWVRQAPGQGLKWMGWINTYTGEPTYADDFKGRFVFSLDTSVSTAYLQISSLKAEDTAVYYCARRRYEGNYVFYYFDYWGQGTTVTVSSASTKGPSVFPLAPSSKSTSGGTAALGCLVKDYFPEPVTVSWNSGALTSGVHTFPAVLQSSGLYSLSSVVTVPSSSLGTQTYICNVNHKPSNTKVDKKVEPKSCDKTHTCPPCPAPELLGGPSVFLFPPKPKDTLMISRTPEVTCVVVDVSHEDPEVKFNWYVDGVEVHNAKTKPREEQYNSTYRVVSVLTVLHQDWLNGKEYKCKVSNKALPAPIEKTISKAKGQPREPQVYTLPPSREEMTKNQVSLTCLVKGFYPSDIAVEWESNGQPENNYKTTPPVLDSDGSFFLYSKLTVDKSRWQQGNVFSCSVMHEALHNHYTQKSLSLSPGKGGGGSGGGGSGGGGSEEELQVIQPDKSVLVAAGETATLRCTATSLIPVGPIQWFRGAGPGRELIYNQKEGHFPRVTTVSDLTKRNNMDFSIRIGNITPADAGTYYCVKFRKGSPDDVEFKSGAGTELSVRAKPS

SEQ ID NO: 432 - protein, 605 aa, Artificial Sequence
  Description of Artificial Sequence: Synthetic polypeptide
QVQLVQSGSELKKPGASVKVSCKASGYTFTHYGMNWVRQAPGQGLKWMGWINTYTGEPTYADDFKGRFVFSLDTSVSTAYLQISSLKAEDTAVYYCARRRYEGNYVFYYFDYWGQGTTVTVSSASTKGPSVFPLAPSSKSTSGGTAALGCLVKDYFPEPVTVSWNSGALTSGVHTFPAVLQSSGLYSLSSVVTVPSSSLGTQTYICNVNHKPSNTKVDKKVEPKSCDKTHTCPPCPAPELLGGPSVFLFPPKPKDTLMISRTPEVTCVVVDVSHEDPEVKFNWYVDGVEVHNAKTKPREEQYNSTYRVVSVLTVLHQDWLNGKEYKCKVSNKALPAPIEKTISKAKGQPREPQVYTLPPSREEMTKNQVSLTCLVKGFYPSDIAVEWESNGQPENNYKTTPPVLDSDGSFFLYSKLTVDKSRWQQGNVFSCSVMHEALHNHYTQKSLSLSPGKGGGGSGGGGSGGGGSTIPPHVQKSVNNDMIVTDNNGAVKFPQLCKFCDVRFSTCDNQKSCMSNCSITSICEKPQEVCVAVWRKNDENITLETVCHDPKLPYHDFILEDAASPKCIMKEKKKPGETFFMCSCSSDECNDNIIFSEEYNTSNPD

SEQ ID NO: 433 - protein, 649 aa, Artificial Sequence
  Description of Artificial Sequence: Synthetic polypeptide
QVQLVQSGSELKKPGASVKVSCKASGYTFTHYGMNWVRQAPGQGLKWMGWINTYTGEPTYADDFKGRFVFSLDTSVSTAYLQISSLKAEDTAVYYCARRRYEGNYVFYYFDYWGQGTTVTVSSASTKGPSVFPLAPSSKSTSGGTAALGCLVKDYFPEPVTVSWNSGALTSGVHTFPAVLQSSGLYSLSSVVTVPSSSLGTQTYICNVNHKPSNTKVDKKVEPKSCDKTHTCPPCPAPELLGGPSVFLFPPKPKDTLMISRTPEVTCVVVDVSHEDPEVKFNWYVDGVEVHNAKTKPREEQYNSTYRVVSVLTVLHQDWLNGKEYKCKVSNKALPAPIEKTISKAKGQPREPQVYTLPPSREEMTKNQVSLTCLVKGFYPSDIAVEWESNGQPENNYKTTPPVLDSDGSFFLYSKLTVDKSRWQQGNVFSCSVMHEALHNHYTQKSLSLSPGKGGGGSGGGGSGGGGSSEVEYRAEVGQNAYLPCFYTPAAPGNLVPVCWGKGACPVFECGNVVLRTDERDVNYWTSRYWLNGDFRKGDVSLTIENVTLADSGIYCCRIQIPGIMNDEKFNLKLVIKPAKVTPAPTRQRDFTAAFPRMLTTRGHGPAETQTLGSLPDINLTQISTLANELRDSRLANDLRDSGATIRIG

SEQ ID NO: 434 - protein, 673 aa, Artificial Sequence
  Description of Artificial Sequence: Synthetic polypeptide
QVQLVQSGSELKKPGASVKVSCKASGYTFTHYGMNWVRQAPGQGLKWMGWINTYTGEPTYADDFKGRFVFSLDTSVSTAYLQISSLKAEDTAVYYCARRRYEGNYVFYYFDYWGQGTTVTVSSASTKGPSVFPLAPSSKSTSGGTAALGCLVKDYFPEPVTVSWNSGALTSGVHTFPAVLQSSGLYSLSSVVTVPSSSLGTQTYICNVNHKPSNTKVDKKVEPKSCDKTHTCPPCPAPELLGGPSVFLFPPKPKDTLMISRTPEVTCVVVDVSHEDPEVKFNWYVDGVEVHNAKTKPREEQYNSTYRVVSVLTVLHQDWLNGKEYKCKVSNKALPAPIEKTISKAKGQPREPQVYTLPPSREEMTKNQVSLTCLVKGFYPSDIAVEWESNGQPENNYKTTPPVLDSDGSFFLYSKLTVDKSRWQQGNVFSCSVMHEALHNHYTQKSLSLSPGKGGGGSGGGGSGGGGSSDTGRPFVEMYSEIPEIIHMTEGRELVIPCRVTSPNITVTLKKFPLDTLIPDGKRIIWDSRKGFIISNATYKEIGLLTCEATVNGHLYKTNYLTHRQTNTIIDVVLSPSHGIELSVGEKLVLNCTARTELNVGIDFNWEYPSSKHQHKKLVNRDLKTQSGSEMKKFLSTLTIDGVTRSDQGLYTCAASSGLMTKKNSTFVRVHEK

SEQ ID NO: 435 - protein, 555 aa, Artificial Sequence
  Description of Artificial Sequence: Synthetic polypeptide
QVQLVESGGGVVQPGRSLRLSCAASGFTFSSYTMHWVRQAPGKGLEWVTFISYDGNNKYYADSVKGRFTISRDNSKNTLYLQMNSLRAEDTAIYYCARTGWLGPFDYWGQGTLVTVSSASTKGPSVFPLAPSSKSTSGGTAALGCLVKDYFPEPVTVSWNSGALTSGVHTFPAVLQSSGLYSLSSVVTVPSSSLGTQTYICNVNHKPSNTKVDKRVEPKSCDKTHTCPPCPAPELLGGPSVFLFPPKPKDTLMISRTPEVTCVVVDVSHEDPEVKFNWYVDGVEVHNAKTKPREEQYNSTYRVVSVLTVLHQDWLNGKEYKCKVSNKALPAPIEKTISKAKGQPREPQVYTLPPSRDELTKNQVSLTCLVKGFYPSDIAVEWESNGQPENNYKTTPPVLDSDGSFFLYSKLTVDKSRWQQGGGGSGGGGSGGGGSKESCDVQLYIKRQSEHSILAGDPFELECPVKYCANRPHVTWCKLNGTTCVKLEDRQTSWKEEKNISFFILHFEPVLPNDNGSYRCSANFQSNLIESHSTTLYVTDVKSASERPSKDEMAS

SEQ ID NO: 436 - protein, 380 aa, Artificial Sequence
  Description of Artificial Sequence: Synthetic polypeptide
EIVLTQSPGTLSLSPGERATLSCRASQSVGSSYLAWYQQKPGQAPRLLIYGAFSRATGIPDRFSGSGSGTDFTLTISRLEPEDFAVYYCQQYGSSPWTFGQGTKVEIKRTVAAPSVFIFPPSDEQLKSGTASVVCLLNNFYPREAKVQWKVDNALQSGNSQESVTEQDSKDSTYSLSSTLTLSKADYEKHKVYACEVTHQGLSSPVTKSFNRGECGGGGSGGGGSGGGGSPGWFLDSPDRPWNPPTFSPALLVVTEGDNATFTCSFSNTSESFVLNWYRMSPSNQTDKLAAFPEDRSQPGQDCRFRVTQLPNGRDFHMSVVRARRNDSGTYLCGAISLAPKAQIKESLRAELRVTERRAEVPTAHPSPSPRPAGQFQTLV

SEQ ID NO: 437 - protein, 760 aa, Artificial Sequence
  Description of Artificial Sequence: Synthetic polypeptide
EIVLTQSPGTLSLSPGERATLSCRASQSVGSSYLAWYQQKPGQAPRLLIYGAFSRATGIPDRFSGSGSGTDFTLTISRLEPEDFAVYYCQQYGSSPWTFGQGTKVEIKRTVAAPSVFIFPPSDEQLKSGTASVVCLLNNFYPREAKVQWKVDNALQSGNSQESVTEQDSKDSTYSLSSTLTLSKADYEKHKVYACEVTHQGLSSPVTKSFNRGECGGGGSGGGGSGGGGSMDGRFWIRVQESVMVPEGLCISVPCSFSYPRQDWTGSTPAYGYWFKAVTETTKGAPVATNHQSREVEMSTRGRFQLTGDPAKGNCSLVIRDAQMQDESQYFFRVERGSYVRYNFMNDGFFLKVTALTQKPDVYIPETLEPGQPVTVICVFNWAFEECPPPSFSWTGAALSSQGTKPTTSHFSVLSFTPRPQDHNTDLTCHVDFSRKGVSAQRTVRLRVAYAPRDLVISISRDNTPALEPQPQGNVPYLEAQKGQFLRLLCAADSQPPATLSWVLQNRVLSSSHPWGPRPLGLELPGVKAGDSGRYTCRAENRLGSQQRALDLSVQYPPENLRVMVSQANRTVLENLGNGTSLPVLEGQSLCLVCVTHSSPPARLSWTQRGQVLSPSQPSDPGVLELPRVQVEHEGEFTCHARHPLGSQHVSLSLSVHYSPKLLGPSCSWEAEGLHCSCSSQASPAPSLRWWLGEELLEGNSSQDSFEVTPSSAGPWANSSLSLHGGLSSGLRLRCEAWNVHGAQSGSILQLPDKKGLIST

SEQ ID NO: 438 - protein, 349 aa, Artificial Sequence
  Description of Artificial Sequence: Synthetic polypeptide
EIVLTQSPGTLSLSPGERATLSCRASQSVGSSYLAWYQQKPGQAPRLLIYGAFSRATGIPDRFSGSGSGTDFTLTISRLEPEDFAVYYCQQYGSSPWTFGQGTKVEIKRTVAAPSVFIFPPSDEQLKSGTASVVCLLNNFYPREAKVQWKVDNALQSGNSQESVTEQDSKDSTYSLSSTLTLSKADYEKHKVYACEVTHQGLSSPVTKSFNRGECGGGGSGGGGSGGGGSEEELQVIQPDKSVLVAAGETATLRCTATSLIPVGPIQWFRGAGPGRELIYNQKEGHFPRVTTVSDLTKRNNMDFSIRIGNITPADAGTYYCVKFRKGSPDDVEFKSGAGTELSVRAKPS

SEQ ID NO: 439 - protein, 411 aa, Artificial Sequence
  Description of Artificial Sequence: Synthetic polypeptide
EIVLTQSPGTLSLSPGERATLSCRASQSVGSSYLAWYQQKPGQAPRLLIYGAFSRATGIPDRFSGSGSGTDFTLTISRLEPEDFAVYYCQQYGSSPWTFGQGTKVEIKRTVAAPSVFIFPPSDEQLKSGTASVVCLLNNFYPREAKVQWKVDNALQSGNSQESVTEQDSKDSTYSLSSTLTLSKADYEKHKVYACEVTHQGLSSPVTKSFNRGECGGGGSGGGGSGGGGSSEVEYRAEVGQNAYLPCFYTPAAPGNLVPVCWGKGACPVFECGNVVLRTDERDVNYWTSRYWLNGDFRKGDVSLTIENVTLADSGIYCCRIQIPGIMNDEKFNLKLVIKPAKVTPAPTRQRDFTAAFPRMLTTRGHGPAETQTLGSLPDINLTQISTLANELRDSRLANDLRDSGATIRIG

SEQ ID NO: 440 - protein, 585 aa, Artificial Sequence
  Description of Artificial Sequence: Synthetic polypeptide
QVQLVESGGGVVQPGRSLRLSCAASGFTFSSYTMHWVRQAPGKGLEWVTFISYDGNNKYYADSVKGRFTISRDNSKNTLYLQMNSLRAEDTAIYYCARTGWLGPFDYWGQGTLVTVSSASTKGPSVFPLAPSSKSTSGGTAALGCLVKDYFPEPVTVSWNSGALTSGVHTFPAVLQSSGLYSLSSVVTVPSSSLGTQTYICNVNHKPSNTKVDKRVEPKSCDKTHTCPPCPAPELLGGPSVFLFPPKPKDTLMISRTPEVTCVVVDVSHEDPEVKFNWYVDGVEVHNAKTKPREEQYNSTYRVVSVLTVLHQDWLNGKEYKCKVSNKALPAPIEKTISKAKGQPREPQVYTLPPSRDELTKNQVSLTCLVKGFYPSDIAVEWESNGQPENNYKTTPPVLDSDGSFFLYSKLTVDKSRWQQGGGGSGGGGSGGGGSPGWFLDSPDRPWNPPTFSPALLVVTEGDNATFTCSFSNTSESFVLNWYRMSPSNQTDKLAAFPEDRSQPGQDCRFRVTQLPNGRDFHMSVVRARRNDSGTYLCGAISLAPKAQIKESLRAELRVTERRAEVPTAHPSPSPRPAGQFQTLV

SEQ ID NO: 441 - protein, 350 aa, Artificial Sequence
  Description of Artificial Sequence: Synthetic polypeptide
EIVLTQSPGTLSLSPGERATLSCRASQSVGSSYLAWYQQKPGQAPRLLIYGAFSRATGIPDRFSGSGSGTDFTLTISRLEPEDFAVYYCQQYGSSPWTFGQGTKVEIKRTVAAPSVFIFPPSDEQLKSGTASVVCLLNNFYPREAKVQWKVDNALQSGNSQESVTEQDSKDSTYSLSSTLTLSKADYEKHKVYACEVTHQGLSSPVTKSFNRGECGGGGSGGGGSGGGGSKESCDVQLYIKRQSEHSILAGDPFELECPVKYCANRPHVTWCKLNGTTCVKLEDRQTSWKEEKNISFFILHFEPVLPNDNGSYRCSANFQSNLIESHSTTLYVTDVKSASERPSKDEMAS

SEQ ID NO: 442 - protein, 965 aa, Artificial Sequence
  Description of Artificial Sequence: Synthetic polypeptide
QVQLVESGGGVVQPGRSLRLSCAASGFTFSSYTMHWVRQAPGKGLEWVTFISYDGNNKYYADSVKGRFTISRDNSKNTLYLQMNSLRAEDTAIYYCARTGWLGPFDYWGQGTLVTVSSASTKGPSVFPLAPSSKSTSGGTAALGCLVKDYFPEPVTVSWNSGALTSGVHTFPAVLQSSGLYSLSSVVTVPSSSLGTQTYICNVNHKPSNTKVDKRVEPKSCDKTHTCPPCPAPELLGGPSVFLFPPKPKDTLMISRTPEVTCVVVDVSHEDPEVKFNWYVDGVEVHNAKTKPREEQYNSTYRVVSVLTVLHQDWLNGKEYKCKVSNKALPAPIEKTISKAKGQPREPQVYTLPPSRDELTKNQVSLTCLVKGFYPSDIAVEWESNGQPENNYKTTPPVLDSDGSFFLYSKLTVDKSRWQQGGGGSGGGGSGGGGSMDGRFWIRVQESVMVPEGLCISVPCSFSYPRQDWTGSTPAYGYWFKAVTETTKGAPVATNHQSREVEMSTRGRFQLTGDPAKGNCSLVIRDAQMQDESQYFFRVERGSYVRYNFMNDGFFLKVTALTQKPDVYIPETLEPGQPVTVICVFNWAFEECPPPSFSWTGAALSSQGTKPTTSHFSVLSFTPRPQDHNTDLTCHVDFSRKGVSAQRTVRLRVAYAPRDLVISISRDNTPALEPQPQGNVPYLEAQKGQFLRLLCAADSQPPATLSWVLQNRVLSSSHPWGPRPLGLELPGVKAGDSGRYTCRAENRLGSQQRALDLSVQYPPENLRVMVSQANRTVLENLGNGTSLPVLEGQSLCLVCVTHSSPPARLSWTQRGQVLSPSQPSDPGVLELPRVQVEHEGEFTCHARHPLGSQHVSLSLSVHYSPKLLGPSCSWEAEGLHCSCSSQASPAPSLRWWLGEELLEGNSSQDSFEVTPSSAGPWANSSLSLHGGLSSGLRLRCEAWNVHGAQSGSILQLPDKKGLIST

SEQ ID NO: 443 - protein, 554 aa, Artificial Sequence
  Description of Artificial Sequence: Synthetic polypeptide
QVQLVESGGGVVQPGRSLRLSCAASGFTFSSYTMHWVRQAPGKGLEWVTFISYDGNNKYYADSVKGRFTISRDNSKNTLYLQMNSLRAEDTAIYYCARTGWLGPFDYWGQGTLVTVSSASTKGPSVFPLAPSSKSTSGGTAALGCLVKDYFPEPVTVSWNSGALTSGVHTFPAVLQSSGLYSLSSVVTVPSSSLGTQTYICNVNHKPSNTKVDKRVEPKSCDKTHTCPPCPAPELLGGPSVFLFPPKPKDTLMISRTPEVTCVVVDVSHEDPEVKFNWYVDGVEVHNAKTKPREEQYNSTYRVVSVLTVLHQDWLNGKEYKCKVSNKALPAPIEKTISKAKGQPREPQVYTLPPSRDELTKNQVSLTCLVKGFYPSDIAVEWESNGQPENNYKTTPPVLDSDGSFFLYSKLTVDKSRWQQGGGGSGGGGSGGGGSEEELQVIQPDKSVLVAAGETATLRCTATSLIPVGPIQWFRGAGPGRELIYNQKEGHFPRVTTVSDLTKRNNMDFSIRIGNITPADAGTYYCVKFRKGSPDDVEFKSGAGTELSVRAKPS

SEQ ID NO: 444 - protein, 572 aa, Artificial Sequence
  Description of Artificial Sequence: Synthetic polypeptide
QVQLVESGGGVVQPGRSLRLSCAASGFTFSSYTMHWVRQAPGKGLEWVTFISYDGNNKYYADSVKGRFTISRDNSKNTLYLQMNSLRAEDTAIYYCARTGWLGPFDYWGQGTLVTVSSASTKGPSVFPLAPSSKSTSGGTAALGCLVKDYFPEPVTVSWNSGALTSGVHTFPAVLQSSGLYSLSSVVTVPSSSLGTQTYICNVNHKPSNTKVDKRVEPKSCDKTHTCPPCPAPELLGGPSVFLFPPKPKDTLMISRTPEVTCVVVDVSHEDPEVKFNWYVDGVEVHNAKTKPREEQYNSTYRVVSVLTVLHQDWLNGKEYKCKVSNKALPAPIEKTISKAKGQPREPQVYTLPPSRDELTKNQVSLTCLVKGFYPSDIAVEWESNGQPENNYKTTPPVLDSDGSFFLYSKLTVDKSRWQQGGGGSGGGGSGGGGSTIPPHVQKSVNNDMIVTDNNGAVKFPQLCKFCDVRFSTCDNQKSCMSNCSITSICEKPQEVCVAVWRKNDENITLETVCHDPKLPYHDFILEDAASPKCIMKEKKKPGETFFMCSCSSDECNDNIIFSEEYNTSNPD

SEQ ID NO: 445 - protein, 616 aa, Artificial Sequence
  Description of Artificial Sequence: Synthetic polypeptide
QVQLVESGGGVVQPGRSLRLSCAASGFTFSSYTMHWVRQAPGKGLEWVTFISYDGNNKYYADSVKGRFTISRDNSKNTLYLQMNSLRAEDTAIYYCARTGWLGPFDYWGQGTLVTVSSASTKGPSVFPLAPSSKSTSGGTAALGCLVKDYFPEPVTVSWNSGALTSGVHTFPAVLQSSGLYSLSSVVTVPSSSLGTQTYICNVNHKPSNTKVDKRVEPKSCDKTHTCPPCPAPELLGGPSVFLFPPKPKDTLMISRTPEVTCVVVDVSHEDPEVKFNWYVDGVEVHNAKTKPREEQYNSTYRVVSVLTVLHQDWLNGKEYKCKVSNKALPAPIEKTISKAKGQPREPQVYTLPPSRDELTKNQVSLTCLVKGFYPSDIAVEWESNGQPENNYKTTPPVLDSDGSFFLYSKLTVDKSRWQQGGGGSGGGGSGGGGSSEVEYRAEVGQNAYLPCFYTPAAPGNLVPVCWGKGACPVFECGNVVLRTDERDVNYWTSRYWLNGDFRKGDVSLTIENVTLADSGIYCCRIQIPGIMNDEKFNLKLVIKPAKVTPAPTRQRDFTAAFPRMLTTRGHGPAETQTLGSLPDINLTQISTLANELRDSRLANDLRDSGATIRIG

SEQ ID NO: 446 - protein, 640 aa, Artificial Sequence
  Description of Artificial Sequence: Synthetic polypeptide
QVQLVESGGGVVQPGRSLRLSCAASGFTFSSYTMHWVRQAPGKGLEWVTFISYDGNNKYYADSVKGRFTISRDNSKNTLYLQMNSLRAEDTAIYYCARTGWLGPFDYWGQGTLVTVSSASTKGPSVFPLAPSSKSTSGGTAALGCLVKDYFPEPVTVSWNSGALTSGVHTFPAVLQSSGLYSLSSVVTVPSSSLGTQTYICNVNHKPSNTKVDKRVEPKSCDKTHTCPPCPAPELLGGPSVFLFPPKPKDTLMISRTPEVTCVVVDVSHEDPEVKFNWYVDGVEVHNAKTKPREEQYNSTYRVVSVLTVLHQDWLNGKEYKCKVSNKALPAPIEKTISKAKGQPREPQVYTLPPSRDELTKNQVSLTCLVKGFYPSDIAVEWESNGQPENNYKTTPPVLDSDGSFFLYSKLTVDKSRWQQGGGGSGGGGSGGGGSSDTGRPFVEMYSEIPEIIHMTEGRELVIPCRVTSPNITVTLKKFPLDTLIPDGKRIIWDSRKGFIISNATYKEIGLLTCEATVNGHLYKTNYLTHRQTNTIIDVVLSPSHGIELSVGEKLVLNCTARTELNVGIDFNWEYPSSKHQHKKLVNRDLKTQSGSEMKKFLSTLTIDGVTRSDQGLYTCAASSGLMTKKNSTFVRVHEK

SEQ ID NO: 447 - protein, 582 aa, Artificial Sequence
  Description of Artificial Sequence: Synthetic polypeptide
QVQLVQSGVEVKKPGASVKVSCKASGYTFTNYYMYWVRQAPGQGLEWMGGINPSNGGTNFNEKFKNRVTLTTDSSTTTAYMELKSLQFDDTAVYYCARRDYRFDMGFDYWGQGTTVTVSSASTKGPSVFPLAPCSRSTSESTAALGCLVKDYFPEPVTVSWNSGALTSGVHTFPAVLQSSGLYSLSSVVTVPSSSLGTKTYTCNVDHKPSNTKVDKRVESKYGPPCPPCPAPEFLGGPSVFLFPPKPKDTLMISRTPEVTCVVVDVSQEDPEVQFNWYVDGVEVHNAKTKPREEQFNSTYRVVSVLTVLHQDWLNGKEYKCKVSNKGLPSSIEKTISKAKGQPREPQVYTLPPSQEEMTKNQVSLTCLVKGFYPSDIAVEWESNGQPENNYKTTPPVLDSDGSFFLYSRLTVDKSRWQEGNVFSCSVMHEALHNHYTQKSLSLSLGKGGGGSGGGGSGGGGSKESCDVQLYIKRQSEHSILAGDPFELECPVKYCANRPHVTWCKLNGTTCVKLEDRQTSWKEEKNISFFILHFEPVLPNDNGSYRCSANFQSNLIESHSTTLYVTDVKSASERPSKDEMAS

SEQ ID NO: 448 - protein, 383 aa, Artificial Sequence
  Description of Artificial Sequence: Synthetic polypeptide
EIVLTQSPATLSLSPGERATLSCRASKGVSTSGYSYLHWYQQKPGQAPRLLIYLASYLESGVPARFSGSGSGTDFTLTISSLEPEDFAVYYCQHSRDLPLTFGGGTKVEIKRTVAAPSVFIFPPSDEQLKSGTASVVCLLNNFYPREAKVQWKVDNALQSGNSQESVTEQDSKDSTYSLSSTLTLSKADYEKHKVYACEVTHQGLSSPVTKSFNRGECGGGGSGGGGSGGGGSPGWFLDSPDRPWNPPTFSPALLVVTEGDNATFTCSFSNTSESFVLNWYRMSPSNQTDKLAAFPEDRSQPGQDCRFRVTQLPNGRDFHMSVVRARRNDSGTYLCGAISLAPKAQIKESLRAELRVTERRAEVPTAHPSPSPRPAGQFQTLV

SEQ ID NO: 449 - protein, 763 aa, Artificial Sequence
  Description of Artificial Sequence: Synthetic polypeptide
EIVLTQSPATLSLSPGERATLSCRASKGVSTSGYSYLHWYQQKPGQAPRLLIYLASYLESGVPARFSGSGSGTDFTLTISSLEPEDFAVYYCQHSRDLPLTFGGGTKVEIKRTVAAPSVFIFPPSDEQLKSGTASVVCLLNNFYPREAKVQWKVDNALQSGNSQESVTEQDSKDSTYSLSSTLTLSKADYEKHKVYACEVTHQGLSSPVTKSFNRGECGGGGSGGGGSGGGGSMDGRFWIRVQESVMVPEGLCISVPCSFSYPRQDWTGSTPAYGYWFKAVTETTKGAPVATNHQSREVEMSTRGRFQLTGDPAKGNCSLVIRDAQMQDESQYFFRVERGSYVRYNFMNDGFFLKVTALTQKPDVYIPETLEPGQPVTVICVFNWAFEECPPPSFSWTGAALSSQGTKPTTSHFSVLSFTPRPQDHNTDLTCHVDFSRKGVSAQRTVRLRVAYAPRDLVISISRDNTPALEPQPQGNVPYLEAQKGQFLRLLCAADSQPPATLSWVLQNRVLSSSHPWGPRPLGLELPGVKAGDSGRYTCRAENRLGSQQRALDLSVQYPPENLRVMVSQANRTVLENLGNGTSLPVLEGQSLCLVCVTHSSPPARLSWTQRGQVLSPSQPSDPGVLELPRVQVEHEGEFTCHARHPLGSQHVSLSLSVHYSPKLLGPSCSWEAEGLHCSCSSQASPAPSLRWWLGEELLEGNSSQDSFEVTPSSAGPWANSSLSLHGGLSSGLRLRCEAWNVHGAQSGSILQLPDKKGLIST

SEQ ID NO: 450 - protein, 352 aa, Artificial Sequence
  Description of Artificial Sequence: Synthetic polypeptide
EIVLTQSPATLSLSPGERATLSCRASKGVSTSGYSYLHWYQQKPGQAPRLLIYLASYLESGVPARFSGSGSGTDFTLTISSLEPEDFAVYYCQHSRDLPLTFGGGTKVEIKRTVAAPSVFIFPPSDEQLKSGTASVVCLLNNFYPREAKVQWKVDNALQSGNSQESVTEQDSKDSTYSLSSTLTLSKADYEKHKVYACEVTHQGLSSPVTKSFNRGECGGGGSGGGGSGGGGSEEELQVIQPDKSVLVAAGETATLRCTATSLIPVGPIQWFRGAGPGRELIYNQKEGHFPRVTTVSDLTKRNNMDFSIRIGNITPADAGTYYCVKFRKGSPDDVEFKSGAGTELSVRAKPS

SEQ ID NO: 451 - protein, 414 aa, Artificial Sequence
  Description of Artificial Sequence: Synthetic polypeptide
EIVLTQSPATLSLSPGERATLSCRASKGVSTSGYSYLHWYQQKPGQAPRLLIYLASYLESGVPARFSGSGSGTDFTLTISSLEPEDFAVYYCQHSRDLPLTFGGGTKVEIKRTVAAPSVFIFPPSDEQLKSGTASVVCLLNNFYPREAKVQWKVDNALQSGNSQESVTEQDSKDSTYSLSSTLTLSKADYEKHKVYACEVTHQGLSSPVTKSFNRGECGGGGSGGGGSGGGGSSEVEYRAEVGQNAYLPCFYTPAAPGNLVPVCWGKGACPVFECGNVVLRTDERDVNYWTSRYWLNGDFRKGDVSLTIENVTLADSGIYCCRIQIPGIMNDEKFNLKLVIKPAKVTPAPTRQRDFTAAFPRMLTTRGHGPAETQTLGSLPDINLTQISTLANELRDSRLANDLRDSGATIRIG

SEQ ID NO: 452 - protein, 612 aa, Artificial Sequence
  Description of Artificial Sequence: Synthetic polypeptide
QVQLVQSGVEVKKPGASVKVSCKASGYTFTNYYMYWVRQAPGQGLEWMGGINPSNGGTNFNEKFKNRVTLTTDSSTTTAYMELKSLQFDDTAVYYCARRDYRFDMGFDYWGQGTTVTVSSASTKGPSVFPLAPCSRSTSESTAALGCLVKDYFPEPVTVSWNSGALTSGVHTFPAVLQSSGLYSLSSVVTVPSSSLGTKTYTCNVDHKPSNTKVDKRVESKYGPPCPPCPAPEFLGGPSVFLFPPKPKDTLMISRTPEVTCVVVDVSQEDPEVQFNWYVDGVEVHNAKTKPREEQFNSTYRVVSVLTVLHQDWLNGKEYKCKVSNKGLPSSIEKTISKAKGQPREPQVYTLPPSQEEMTKNQVSLTCLVKGFYPSDIAVEWESNGQPENNYKTTPPVLDSDGSFFLYSRLTVDKSRWQEGNVFSCSVMHEALHNHYTQKSLSLSLGKGGGGSGGGGSGGGGSPGWFLDSPDRPWNPPTFSPALLVVTEGDNATFTCSFSNTSESFVLNWYRMSPSNQTDKLAAFPEDRSQPGQDCRFRVTQLPNGRDFHMSVVRARRNDSGTYLCGAISLAPKAQIKESLRAELRVTERRAEVPTAHPSPSPRPAGQFQTLV

SEQ ID NO: 453 - protein, 353 aa, Artificial Sequence
  Description of Artificial Sequence: Synthetic polypeptide
EIVLTQSPATLSLSPGERATLSCRASKGVSTSGYSYLHWYQQKPGQAPRLLIYLASYLESGVPARFSGSGSGTDFTLTISSLEPEDFAVYYCQHSRDLPLTFGGGTKVEIKRTVAAPSVFIFPPSDEQLKSGTASVVCLLNNFYPREAKVQWKVDNALQSGNSQESVTEQDSKDSTYSLSSTLTLSKADYEKHKVYACEVTHQGLSSPVTKSFNRGECGGGGSGGGGSGGGGSKESCDVQLYIKRQSEHSILAGDPFELECPVKYCANRPHVTWCKLNGTTCVKLEDRQTSWKEEKNISFFILHFEPVLPNDNGSYRCSANFQSNLIESHSTTLYVTDVKSASERPSKDEMAS

SEQ ID NO: 454 - protein, 992 aa, Artificial Sequence
  Description of Artificial Sequence: Synthetic polypeptide
QVQLVQSGVEVKKPGASVKVSCKASGYTFTNYYMYWVRQAPGQGLEWMGGINPSNGGTNFNEKFKNRVTLTTDSSTTTAYMELKSLQFDDTAVYYCARRDYRFDMGFDYWGQGTTVTVSSASTKGPSVFPLAPCSRSTSESTAALGCLVKDYFPEPVTVSWNSGALTSGVHTFPAVLQSSGLYSLSSVVTVPSSSLGTKTYTCNVDHKPSNTKVDKRVESKYGPPCPPCPAPEFLGGPSVFLFPPKPKDTLMISRTPEVTCVVVDVSQEDPEVQFNWYVDGVEVHNAKTKPREEQFNSTYRVVSVLTVLHQDWLNGKEYKCKVSNKGLPSSIEKTISKAKGQPREPQVYTLPPSQEEMTKNQVSLTCLVKGFYPSDIAVEWESNGQPENNYKTTPPVLDSDGSFFLYSRLTVDKSRWQEGNVFSCSVMHEALHNHYTQKSLSLSLGKGGGGSGGGGSGGGGSMDGRFWIRVQESVMVPEGLCISVPCSFSYPRQDWTGSTPAYGYWFKAVTETTKGAPVATNHQSREVEMSTRGRFQLTGDPAKGNCSLVIRDAQMQDESQYFFRVERGSYVRYNFMNDGFFLKVTALTQKPDVYIPETLEPGQPVTVICVFNWAFEECPPPSFSWTGAALSSQGTKPTTSHFSVLSFTPRPQDHNTDLTCHVDFSRKGVSAQRTVRLRVAYAPRDLVISISRDNTPALEPQPQGNVPYLEAQKGQFLRLLCAADSQPPATLSWVLQNRVLSSSHPWGPRPLGLELPGVKAGDSGRYTCRAENRLGSQQRALDLSVQYPPENLRVMVSQANRTVLENLGNGTSLPVLEGQSLCLVCVTHSSPPARLSWTQRGQVLSPSQPSDPGVLELPRVQVEHEGEFTCHARHPLGSQHVSLSLSVHYSPKLLGPSCSWEAEGLHCSCSSQASPAPSLRWWLGEELLEGNSSQDSFEVTPSSAGPWANSSLSLHGGLSSGLRLRCEAWNVHGAQSGSILQLPDKKGLIST

SEQ ID NO: 455 - protein, 581 aa, Artificial Sequence
  Description of Artificial Sequence: Synthetic polypeptide
QVQLVQSGVEVKKPGASVKVSCKASGYTFTNYYMYWVRQAPGQGLEWMGGINPSNGGTNFNEKFKNRVTLTTDSSTTTAYMELKSLQFDDTAVYYCARRDYRFDMGFDYWGQGTTVTVSSASTKGPSVFPLAPCSRSTSESTAALGCLVKDYFPEPVTVSWNSGALTSGVHTFPAVLQSSGLYSLSSVVTVPSSSLGTKTYTCNVDHKPSNTKVDKRVESKYGPPCPPCPAPEFLGGPSVFLFPPKPKDTLMISRTPEVTCVVVDVSQEDPEVQFNWYVDGVEVHNAKTKPREEQFNSTYRVVSVLTVLHQDWLNGKEYKCKVSNKGLPSSIEKTISKAKGQPREPQVYTLPPSQEEMTKNQVSLTCLVKGFYPSDIAVEWESNGQPENNYKTTPPVLDSDGSFFLYSRLTVDKSRWQEGNVFSCSVMHEALHNHYTQKSLSLSLGKGGGGSGGGGSGGGGSEEELQVIQPDKSVLVAAGETATLRCTATSLIPVGPIQWFRGAGPGRELIYNQKEGHFPRVTTVSDLTKRNNMDFSIRIGNITPADAGTYYCVKFRKGSPDDVEFKSGAGTELSVRAKPS

SEQ ID NO: 456 - protein, 599 aa, Artificial Sequence
  Description of Artificial Sequence: Synthetic polypeptide
QVQLVQSGVEVKKPGASVKVSCKASGYTFTNYYMYWVRQAPGQGLEWMGGINPSNGGTNFNEKFKNRVTLTTDSSTTTAYMELKSLQFDDTAVYYCARRDYRFDMGFDYWGQGTTVTVSSASTKGPSVFPLAPCSRSTSESTAALGCLVKDYFPEPVTVSWNSGALTSGVHTFPAVLQSSGLYSLSSVVTVPSSSLGTKTYTCNVDHKPSNTKVDKRVESKYGPPCPPCPAPEFLGGPSVFLFPPKPKDTLMISRTPEVTCVVVDVSQEDPEVQFNWYVDGVEVHNAKTKPREEQFNSTYRVVSVLTVLHQDWLNGKEYKCKVSNKGLPSSIEKTISKAKGQPREPQVYTLPPSQEEMTKNQVSLTCLVKGFYPSDIAVEWESNGQPENNYKTTPPVLDSDGSFFLYSRLTVDKSRWQEGNVFSCSVMHEALHNHYTQKSLSLSLGKGGGGSGGGGSGGGGSTIPPHVQKSVNNDMIVTDNNGAVKFPQLCKFCDVRFSTCDNQKSCMSNCSITSICEKPQEVCVAVWRKNDENITLETVCHDPKLPYHDFILEDAASPKCIMKEKKKPGETFFMCSCSSDECNDNIIFSEEYNTSNPD

SEQ ID NO: 457 - protein, 643 aa, Artificial Sequence
  Description of Artificial Sequence: Synthetic polypeptide
QVQLVQSGVEVKKPGASVKVSCKASGYTFTNYYMYWVRQAPGQGLEWMGGINPSNGGTNFNEKFKNRVTLTTDSSTTTAYMELKSLQFDDTAVYYCARRDYRFDMGFDYWGQGTTVTVSSASTKGPSVFPLAPCSRSTSESTAALGCLVKDYFPEPVTVSWNSGALTSGVHTFPAVLQSSGLYSLSSVVTVPSSSLGTKTYTCNVDHKPSNTKVDKRVESKYGPPCPPCPAPEFLGGPSVFLFPPKPKDTLMISRTPEVTCVVVDVSQEDPEVQFNWYVDGVEVHNAKTKPREEQFNSTYRVVSVLTVLHQDWLNGKEYKCKVSNKGLPSSIEKTISKAKGQPREPQVYTLPPSQEEMTKNQVSLTCLVKGFYPSDIAVEWESNGQPENNYKTTPPVLDSDGSFFLYSRLTVDKSRWQEGNVFSCSVMHEALHNHYTQKSLSLSLGKGGGGSGGGGSGGGGSSEVEYRAEVGQNAYLPCFYTPAAPGNLVPVCWGKGACPVFECGNVVLRTDERDVNYWTSRYWLNGDFRKGDVSLTIENVTLADSGIYCCRIQIPGIMNDEKFNLKLVIKPAKVTPAPTRQRDFTAAFPRMLTTRGHGPAETQTLGSLPDINLTQISTLANELRDSRLANDLRDSGATIRIG

SEQ ID NO: 458 - protein, 667 aa, Artificial Sequence
  Description of Artificial Sequence: Synthetic polypeptide
QVQLVQSGVEVKKPGASVKVSCKASGYTFTNYYMYWVRQAPGQGLEWMGGINPSNGGTNFNEKFKNRVTLTTDSSTTTAYMELKSLQFDDTAVYYCARRDYRFDMGFDYWGQGTTVTVSSASTKGPSVFPLAPCSRSTSESTAALGCLVKDYFPEPVTVSWNSGALTSGVHTFPAVLQSSGLYSLSSVVTVPSSSLGTKTYTCNVDHKPSNTKVDKRVESKYGPPCPPCPAPEFLGGPSVFLFPPKPKDTLMISRTPEVTCVVVDVSQEDPEVQFNWYVDGVEVHNAKTKPREEQFNSTYRVVSVLTVLHQDWLNGKEYKCKVSNKGLPSSIEKTISKAKGQPREPQVYTLPPSQEEMTKNQVSLTCLVKGFYPSDIAVEWESNGQPENNYKTTPPVLDSDGSFFLYSRLTVDKSRWQEGNVFSCSVMHEALHNHYTQKSLSLSLGKGGGGSGGGGSGGGGSSDTGRPFVEMYSEIPEIIHMTEGRELVIPCRVTSPNITVTLKKFPLDTLIPDGKRIIWDSRKGFIISNATYKEIGLLTCEATVNGHLYKTNYLTHRQTNTIIDVVLSPSHGIELSVGEKLVLNCTARTELNVGIDFNWEYPSSKHQHKKLVNRDLKTQSGSEMKKFLSTLTIDGVTRSDQGLYTCAASSGLMTKKNSTFVRVHEK

SEQ ID NO: 459 - protein, 583 aa, Artificial Sequence
  Description of Artificial Sequence: Synthetic polypeptide
EVQLVESGGGLVQPGGSLRLSCAASGFTFSDSWIHWVRQAPGKGLEWVAWISPYGGSTYYADSVKGRFTISADTSKNTAYLQMNSLRAEDTAVYYCARRHWPGGFDYWGQGTLVTVSAASTKGPSVFPLAPSSKSTSGGTAALGCLVKDYFPEPVTVSWNSGALTSGVHTFPAVLQSSGLYSLSSVVTVPSSSLGTQTYICNVNHKPSNTKVDKKVEPKSCDKTHTCPPCPAPELLGGPSVFLFPPKPKDTLMISRTPEVTCVVVDVSHEDPEVKFNWYVDGVEVHNAKTKPREEQYASTYRVVSVLTVLHQDWLNGKEYKCKVSNKALPAPIEKTISKAKGQPREPQVYTLPPSREEMTKNQVSLTCLVKGFYPSDIAVEWESNGQPENNYKTTPPVLDSDGSFFLYSKLTVDKSRWQQGNVFSCSVMHEALHNHYTQKSLSLSPGKGGGGSGGGGSGGGGSKESCDVQLYIKRQSEHSILAGDPFELECPVKYCANRPHVTWCKLNGTTCVKLEDRQTSWKEEKNISFFILHFEPVLPNDNGSYRCSANFQSNLIESHSTTLYVTDVKSASERPSKDEMAS

SEQ ID NO: 460 - protein, 759 aa, Artificial Sequence
  Description of Artificial Sequence: Synthetic polypeptide
DIQMTQSPSSLSASVGDRVTITCRASQDVSTAVAWYQQKPGKAPKLLIYSASFLYSGVPSRFSGSGSGTDFTLTISSLQPEDFATYYCQQYLYHPATFGQGTKVEIKRTVAAPSVFIFPPSDEQLKSGTASVVCLLNNFYPREAKVQWKVDNALQSGNSQESVTEQDSKDSTYSLSSTLTLSKADYEKHKVYACEVTHQGLSSPVTKSFNRGECGGGGSGGGGSGGGGSMDGRFWIRVQESVMVPEGLCISVPCSFSYPRQDWTGSTPAYGYWFKAVTETTKGAPVATNHQSREVEMSTRGRFQLTGDPAKGNCSLVIRDAQMQDESQYFFRVERGSYVRYNFMNDGFFLKVTALTQKPDVYIPETLEPGQPVTVICVFNWAFEECPPPSFSWTGAALSSQGTKPTTSHFSVLSFTPRPQDHNTDLTCHVDFSRKGVSAQRTVRLRVAYAPRDLVISISRDNTPALEPQPQGNVPYLEAQKGQFLRLLCAADSQPPATLSWVLQNRVLSSSHPWGPRPLGLELPGVKAGDSGRYTCRAENRLGSQQRALDLSVQYPPENLRVMVSQANRTVLENLGNGTSLPVLEGQSLCLVCVTHSSPPARLSWTQRGQVLSPSQPSDPGVLELPRVQVEHEGEFTCHARHPLGSQHVSLSLSVHYSPKLLGPSCSWEAEGLHCSCSSQASPAPSLRWWLGEELLEGNSSQDSFEVTPSSAGPWANSSLSLHGGLSSGLRLRCEAWNVHGAQSGSILQLPDKKGLIST

SEQ ID NO: 461 - protein, 348 aa, Artificial Sequence
  Description of Artificial Sequence: Synthetic polypeptide
DIQMTQSPSSLSASVGDRVTITCRASQDVSTAVAWYQQKPGKAPKLLIYSASFLYSGVPSRFSGSGSGTDFTLTISSLQPEDFATYYCQQYLYHPATFGQGTKVEIKRTVAAPSVFIFPPSDEQLKSGTASVVCLLNNFYPREAKVQWKVDNALQSGNSQESVTEQDSKDSTYSLSSTLTLSKADYEKHKVYACEVTHQGLSSPVTKSFNRGECGGGGSGGGGSGGGGSEEELQVIQPDKSVLVAAGETATLRCTATSLIPVGPIQWFRGAGPGRELIYNQKEGHFPRVTTVSDLTKRNNMDFSIRIGNITPADAGTYYCVKFRKGSPDDVEFKSGAGTELSVRAKPS

SEQ ID NO: 462 - protein, 410 aa, Artificial Sequence
  Description of Artificial Sequence: Synthetic polypeptide
DIQMTQSPSSLSASVGDRVTITCRASQDVSTAVAWYQQKPGKAPKLLIYSASFLYSGVPSRFSGSGSGTDFTLTISSLQPEDFATYYCQQYLYHPATFGQGTKVEIKRTVAAPSVFIFPPSDEQLKSGTASVVCLLNNFYPREAKVQWKVDNALQSGNSQESVTEQDSKDSTYSLSSTLTLSKADYEKHKVYACEVTHQGLSSPVTKSFNRGECGGGGSGGGGSGGGGSSEVEYRAEVGQNAYLPCFYTPAAPGNLVPVCWGKGACPVFECGNVVLRTDERDVNYWTSRYWLNGDFRKGDVSLTIENVTLADSGIYCCRIQIPGIMNDEKFNLKLVIKPAKVTPAPTRQRDFTAAFPRMLTTRGHGPAETQTLGSLPDINLTQISTLANELRDSRLANDLRDSGATIRIG

SEQ ID NO: 463 - protein, 993 aa, Artificial Sequence
  Description of Artificial Sequence: Synthetic polypeptide
EVQLVESGGGLVQPGGSLRLSCAASGFTFSDSWIHWVRQAPGKGLEWVAWISPYGGSTYYADSVKGRFTISADTSKNTAYLQMNSLRAEDTAVYYCARRHWPGGFDYWGQGTLVTVSAASTKGPSVFPLAPSSKSTSGGTAALGCLVKDYFPEPVTVSWNSGALTSGVHTFPAVLQSSGLYSLSSVVTVPSSSLGTQTYICNVNHKPSNTKVDKKVEPKSCDKTHTCPPCPAPELLGGPSVFLFPPKPKDTLMISRTPEVTCVVVDVSHEDPEVKFNWYVDGVEVHNAKTKPREEQYASTYRVVSVLTVLHQDWLNGKEYKCKVSNKALPAPIEKTISKAKGQPREPQVYTLPPSREEMTKNQVSLTCLVKGFYPSDIAVEWESNGQPENNYKTTPPVLDSDGSFFLYSKLTVDKSRWQQGNVFSCSVMHEALHNHYTQKSLSLSPGKGGGGSGGGGSGGGGSMDGRFWIRVQESVMVPEGLCISVPCSFSYPRQDWTGSTPAYGYWFKAVTETTKGAPVATNHQSREVEMSTRGRFQLTGDPAKGNCSLVIRDAQMQDESQYFFRVERGSYVRYNFMNDGFFLKVTALTQKPDVYIPETLEPGQPVTVICVFNWAFEECPPPSFSWTGAALSSQGTKPTTSHFSVLSFTPRPQDHNTDLTCHVDFSRKGVSAQRTVRLRVAYAPRDLVISISRDNTPALEPQPQGNVPYLEAQKGQFLRLLCAADSQPPATLSWVLQNRVLSSSHPWGPRPLGLELPGVKAGDSGRYTCRAENRLGSQQRALDLSVQYPPENLRVMVSQANRTVLENLGNGTSLPVLEGQSLCLVCVTHSSPPARLSWTQRGQVLSPSQPSDPGVLELPRVQVEHEGEFTCHARHPLGSQHVSLSLSVHYSPKLLGPSCSWEAEGLHCSCSSQASPAPSLRWWLGEELLEGNSSQDSFEVTPSSAGPWANSSLSLHGGLSSGLRLRCEAWNVHGAQSGSILQLPDKKGLIST

SEQ ID NO: 464 - protein, 349 aa, Artificial Sequence
  Description of Artificial Sequence: Synthetic polypeptide
DIQMTQSPSSLSASVGDRVTITCRASQDVSTAVAWYQQKPGKAPKLLIYSASFLYSGVPSRFSGSGSGTDFTLTISSLQPEDFATYYCQQYLYHPATFGQGTKVEIKRTVAAPSVFIFPPSDEQLKSGTASVVCLLNNFYPREAKVQWKVDNALQSGNSQESVTEQDSKDSTYSLSSTLTLSKADYEKHKVYACEVTHQGLSSPVTKSFNRGECGGGGSGGGGSGGGGSKESCDVQLYIKRQSEHSILAGDPFELECPVKYCANRPHVTWCKLNGTTCVKLEDRQTSWKEEKNISFFILHFEPVLPNDNGSYRCSANFQSNLIESHSTTLYVTDVKSASERPSKDEMAS

SEQ ID NO: 465 - protein, 582 aa, Artificial Sequence
  Description of Artificial Sequence: Synthetic polypeptide
EVQLVESGGGLVQPGGSLRLSCAASGFTFSDSWIHWVRQAPGKGLEWVAWISPYGGSTYYADSVKGRFTISADTSKNTAYLQMNSLRAEDTAVYYCARRHWPGGFDYWGQGTLVTVSAASTKGPSVFPLAPSSKSTSGGTAALGCLVKDYFPEPVTVSWNSGALTSGVHTFPAVLQSSGLYSLSSVVTVPSSSLGTQTYICNVNHKPSNTKVDKKVEPKSCDKTHTCPPCPAPELLGGPSVFLFPPKPKDTLMISRTPEVTCVVVDVSHEDPEVKFNWYVDGVEVHNAKTKPREEQYASTYRVVSVLTVLHQDWLNGKEYKCKVSNKALPAPIEKTISKAKGQPREPQVYTLPPSREEMTKNQVSLTCLVKGFYPSDIAVEWESNGQPENNYKTTPPVLDSDGSFFLYSKLTVDKSRWQQGNVFSCSVMHEALHNHYTQKSLSLSPGKGGGGSGGGGSGGGGSEEELQVIQPDKSVLVAAGETATLRCTATSLIPVGPIQWFRGAGPGRELIYNQKEGHFPRVTTVSDLTKRNNMDFSIRIGNITPADAGTYYCVKFRKGSPDDVEFKSGAGTELSVRAKPS

SEQ ID NO: 466 - protein, 600 aa, Artificial Sequence
  Description of Artificial Sequence: Synthetic polypeptide
EVQLVESGGGLVQPGGSLRLSCAASGFTFSDSWIHWVRQAPGKGLEWVAWISPYGGSTYYADSVKGRFTISADTSKNTAYLQMNSLRAEDTAVYYCARRHWPGGFDYWGQGTLVTVSAASTKGPSVFPLAPSSKSTSGGTAALGCLVKDYFPEPVTVSWNSGALTSGVHTFPAVLQSSGLYSLSSVVTVPSSSLGTQTYICNVNHKPSNTKVDKKVEPKSCDKTHTCPPCPAPELLGGPSVFLFPPKPKDTLMISRTPEVTCVVVDVSHEDPEVKFNWYVDGVEVHNAKTKPREEQYASTYRVVSVLTVLHQDWLNGKEYKCKVSNKALPAPIEKTISKAKGQPREPQVYTLPPSREEMTKNQVSLTCLVKGFYPSDIAVEWESNGQPENNYKTTPPVLDSDGSFFLYSKLTVDKSRWQQGNVFSCSVMHEALHNHYTQKSLSLSPGKGGGGSGGGGSGGGGSTIPPHVQKSVNNDMIVTDNNGAVKFPQLCKFCDVRFSTCDNQKSCMSNCSITSICEKPQEVCVAVWRKNDENITLETVCHDPKLPYHDFILEDAASPKCIMKEKKKPGETFFMCSCSSDECNDNIIFSEEYNTSNPD

SEQ ID NO: 467 - protein, 644 aa, Artificial Sequence
  Description of Artificial Sequence: Synthetic polypeptide
EVQLVESGGGLVQPGGSLRLSCAASGFTFSDSWIHWVRQAPGKGLEWVAWISPYGGSTYYADSVKGRFTISADTSKNTAYLQMNSLRAEDTAVYYCARRHWPGGFDYWGQGTLVTVSAASTKGPSVFPLAPSSKSTSGGTAALGCLVKDYFPEPVTVSWNSGALTSGVHTFPAVLQSSGLYSLSSVVTVPSSSLGTQTYICNVNHKPSNTKVDKKVEPKSCDKTHTCPPCPAPELLGGPSVFLFPPKPKDTLMISRTPEVTCVVVDVSHEDPEVKFNWYVDGVEVHNAKTKPREEQYASTYRVVSVLTVLHQDWLNGKEYKCKVSNKALPAPIEKTISKAKGQPREPQVYTLPPSREEMTKNQVSLTCLVKGFYPSDIAVEWESNGQPENNYKTTPPVLDSDGSFFLYSKLTVDKSRWQQGNVFSCSVMHEALHNHYTQKSLSLSPGKGGGGSGGGGSGGGGSSEVEYRAEVGQNAYLPCFYTPAAPGNLVPVCWGKGACPVFECGNVVLRTDERDVNYWTSRYWLNGDFRKGDVSLTIENVTLADSGIYCCRIQIPGIMNDEKFNLKLVIKPAKVTPAPTRQRDFTAAFPRMLTTRGHGPAETQTLGSLPDINLTQISTLANELRDSRLANDLRDSGATIRIG

SEQ ID NO: 468 - protein, 668 aa, Artificial Sequence
  Description of Artificial Sequence: Synthetic polypeptide
EVQLVESGGGLVQPGGSLRLSCAASGFTFSDSWIHWVRQAPGKGLEWVAWISPYGGSTYYADSVKGRFTISADTSKNTAYLQMNSLRAEDTAVYYCARRHWPGGFDYWGQGTLVTVSAASTKGPSVFPLAPSSKSTSGGTAALGCLVKDYFPEPVTVSWNSGALTSGVHTFPAVLQSSGLYSLSSVVTVPSSSLGTQTYICNVNHKPSNTKVDKKVEPKSCDKTHTCPPCPAPELLGGPSVFLFPPKPKDTLMISRTPEVTCVVVDVSHEDPEVKFNWYVDGVEVHNAKTKPREEQYASTYRVVSVLTVLHQDWLNGKEYKCKVSNKALPAPIEKTISKAKGQPREPQVYTLPPSREEMTKNQVSLTCLVKGFYPSDIAVEWESNGQPENNYKTTPPVLDSDGSFFLYSKLTVDKSRWQQGNVFSCSVMHEALHNHYTQKSLSLSPGKGGGGSGGGGSGGGGSSDTGRPFVEMYSEIPEIIHMTEGRELVIPCRVTSPNITVTLKKFPLDTLIPDGKRIIWDSRKGFIISNATYKEIGLLTCEATVNGHLYKTNYLTHRQTNTIIDVVLSPSHGIELSVGEKLVLNCTARTELNVGIDFNWEYPSSKHQHKKLVNRDLKTQSGSEMKKFLSTLTIDGVTRSDQGLYTCAASSGLMTKKNSTFVRVHEK

SEQ ID NO: 469 - protein, 591 aa, Artificial Sequence
  Description of Artificial Sequence: Synthetic polypeptide
EVQLQQSGPGLVKPSQTLSLTCAISGDSVSSNSAAWNWIRQSPSRGLEWLGKTYYRFKWYSDYAVSVKGRITINPDTSKNQFSLQLNSVTPEDTAVFYCTRESTTYDLLAGPFDYWGQGTLVTVSSASTKGPSVFPLAPSSKSTSGGTAALGCLVKDYFPEPVTVSWNSGALTSGVHTFPAVLQSSGLYSLSSVVTVPSSSLGTQTYICNVNHKPSNTKVDKKVEPKSCDKTHTCPPCPAPELLGGPSVFLFPPKPKDTLMISRTPEVTCVVVDVSHEDPEVKFNWYVDGVEVHNAKTKPREEQYNSTYRVVSVLTVLHQDWLNGKEYKCKVSNKALPAPIEKTISKAKGQPREPQVYTLPPSREEMTKNQVSLTCLVKGFYPSDIAVEWESNGQPENNYKTTPPVLDSDGSFFLYSKLTVDKSRWQQGNVFSCSVMHEALHNHYTQKSLSLSPGKGGGGSGGGGSGGGGSKESCDVQLYIKRQSEHSILAGDPFELECPVKYCANRPHVTWCKLNGTTCVKLEDRQTSWKEEKNISFFILHFEPVLPNDNGSYRCSANFQSNLIESHSTTLYVTDVKSASERPSKDEMAS

SEQ ID NO: 470 - protein, 385 aa, Artificial Sequence
  Description of Artificial Sequence: Synthetic polypeptide
DIVMTQSPDSLAVSLGERATINCKSSQTVLYSSNNKKYLAWYQQKPGQPPNLLIYWASTRESGVPDRFSGSGSGTDFTLTISSLQAEDVAVYYCQQYYSTPFTFGPGTKVEIKRTVAAPSVFIFPPSDEQLKSGTASVVCLLNNFYPREAKVQWKVDNALQSGNSQESVTEQDSKDSTYSLSSTLTLSKADYEKHKVYACEVTHQGLSSPVTKSFNRGECGGGGSGGGGSGGGGSPGWFLDSPDRPWNPPTFSPALLVVTEGDNATFTCSFSNTSESFVLNWYRMSPSNQTDKLAAFPEDRSQPGQDCRFRVTQLPNGRDFHMSVVRARRNDSGTYLCGAISLAPKAQIKESLRAELRVTERRAEVPTAHPSPSPRPAGQFQTLV

SEQ ID NO: 471 - protein, 765 aa, Artificial Sequence
  Description of Artificial Sequence: Synthetic polypeptide
DIVMTQSPDSLAVSLGERATINCKSSQTVLYSSNNKKYLAWYQQKPGQPPNLLIYWASTRESGVPDRFSGSGSGTDFTLTISSLQAEDVAVYYCQQYYSTPFTFGPGTKVEIKRTVAAPSVFIFPPSDEQLKSGTASVVCLLNNFYPREAKVQWKVDNALQSGNSQESVTEQDSKDSTYSLSSTLTLSKADYEKHKVYACEVTHQGLSSPVTKSFNRGECGGGGSGGGGSGGGGSMDGRFWIRVQESVMVPEGLCISVPCSFSYPRQDWTGSTPAYGYWFKAVTETTKGAPVATNHQSREVEMSTRGRFQLTGDPAKGNCSLVIRDAQMQDESQYFFRVERGSYVRYNFMNDGFFLKVTALTQKPDVYIPETLEPGQPVTVICVFNWAFEECPPPSFSWTGAALSSQGTKPTTSHFSVLSFTPRPQDHNTDLTCHVDFSRKGVSAQRTVRLRVAYAPRDLVISISRDNTPALEPQPQGNVPYLEAQKGQFLRLLCAADSQPPATLSWVLQNRVLSSSHPWGPRPLGLELPGVKAGDSGRYTCRAENRLGSQQRALDLSVQYPPENLRVMVSQANRTVLENLGNGTSLPVLEGQSLCLVCVTHSSPPARLSWTQRGQVLSPSQPSDPGVLELPRVQVEHEGEFTCHARHPLGSQHVSLSLSVHYSPKLLGPSCSWEAEGLHCSCSSQASPAPSLRWWLGEELLEGNSSQDSFEVTPSSAGPWANSSLSLHGGLSSGLRLRCEAWNVHGAQSGSILQLPDKKGLIST

SEQ ID NO: 472 - protein, 354 aa, Artificial Sequence
  Description of Artificial Sequence: Synthetic polypeptide
DIVMTQSPDSLAVSLGERATINCKSSQTVLYSSNNKKYLAWYQQKPGQPPNLLIYWASTRESGVPDRFSGSGSGTDFTLTISSLQAEDVAVYYCQQYYSTPFTFGPGTKVEIKRTVAAPSVFIFPPSDEQLKSGTASVVCLLNNFYPREAKVQWKVDNALQSGNSQESVTEQDSKDSTYSLSSTLTLSKADYEKHKVYACEVTHQGLSSPVTKSFNRGECGGGGSGGGGSGGGGSEEELQVIQPDKSVLVAAGETATLRCTATSLIPVGPIQWFRGAGPGRELIYNQKEGHFPRVTTVSDLTKRNNMDFSIRIGNITPADAGTYYCVKFRKGSPDDVEFKSGAGTELSVRAKPS

SEQ ID NO: 473 - protein, 416 aa, Artificial Sequence
  Description of Artificial Sequence: Synthetic polypeptide
DIVMTQSPDSLAVSLGERATINCKSSQTVLYSSNNKKYLAWYQQKPGQPPNLLIYWASTRESGVPDRFSGSGSGTDFTLTISSLQAEDVAVYYCQQYYSTPFTFGPGTKVEIKRTVAAPSVFIFPPSDEQLKSGTASVVCLLNNFYPREAKVQWKVDNALQSGNSQESVTEQDSKDSTYSLSSTLTLSKADYEKHKVYACEVTHQGLSSPVTKSFNRGECGGGGSGGGGSGGGGSSEVEYRAEVGQNAYLPCFYTPAAPGNLVPVCWGKGACPVFECGNVVLRTDERDVNYWTSRYWLNGDFRKGDVSLTIENVTLADSGIYCCRIQIPGIMNDEKFNLKLVIKPAKVTPAPTRQRDFTAAFPRMLTTRGHGPAETQTLGSLPDINLTQISTLANELRDSRLANDLRDSGATIRIG

SEQ ID NO: 474 - protein, 621 aa, Artificial Sequence
  Description of Artificial Sequence: Synthetic polypeptide
EVQLQQSGPGLVKPSQTLSLTCAISGDSVSSNSAAWNWIRQSPSRGLEWLGKTYYRFKWYSDYAVSVKGRITINPDTSKNQFSLQLNSVTPEDTAVFYCTRESTTYDLLAGPFDYWGQGTLVTVSSASTKGPSVFPLAPSSKSTSGGTAALGCLVKDYFPEPVTVSWNSGALTSGVHTFPAVLQSSGLYSLSSVVTVPSSSLGTQTYICNVNHKPSNTKVDKKVEPKSCDKTHTCPPCPAPELLGGPSVFLFPPKPKDTLMISRTPEVTCVVVDVSHEDPEVKFNWYVDGVEVHNAKTKPREEQYNSTYRVVSVLTVLHQDWLNGKEYKCKVSNKALPAPIEKTISKAKGQPREPQVYTLPPSREEMTKNQVSLTCLVKGFYPSDIAVEWESNGQPENNYKTTPPVLDSDGSFFLYSKLTVDKSRWQQGNVFSCSVMHEALHNHYTQKSLSLSPGKGGGGSGGGGSGGGGSPGWFLDSPDRPWNPPTFSPALLVVTEGDNATFTCSFSNTSESFVLNWYRMSPSNQTDKLAAFPEDRSQPGQDCRFRVTQLPNGRDFHMSVVRARRNDSGTYLCGAISLAPKAQIKESLRAELRVTERRAEVPTAHPSPSPRPAGQFQTLV

SEQ ID NO: 475 - protein, 355 aa, Artificial Sequence
  Description of Artificial Sequence: Synthetic polypeptide
DIVMTQSPDSLAVSLGERATINCKSSQTVLYSSNNKKYLAWYQQKPGQPPNLLIYWASTRESGVPDRFSGSGSGTDFTLTISSLQAEDVAVYYCQQYYSTPFTFGPGTKVEIKRTVAAPSVFIFPPSDEQLKSGTASVVCLLNNFYPREAKVQWKVDNALQSGNSQESVTEQDSKDSTYSLSSTLTLSKADYEKHKVYACEVTHQGLSSPVTKSFNRGECGGGGSGGGGSGGGGSKESCDVQLYIKRQSEHSILAGDPFELECPVKYCANRPHVTWCKLNGTTCVKLEDRQTSWKEEKNISFFILHFEPVLPNDNGSYRCSANFQSNLIESHSTTLYVTDVKSASERPSKDEMAS

SEQ ID NO: 476 - protein, 1001 aa, Artificial Sequence
  Description of Artificial Sequence: Synthetic polypeptide
EVQLQQSGPGLVKPSQTLSLTCAISGDSVSSNSAAWNWIRQSPSRGLEWLGKTYYRFKWYSDYAVSVKGRITINPDTSKNQFSLQLNSVTPEDTAVFYCTRESTTYDLLAGPFDYWGQGTLVTVSSASTKGPSVFPLAPSSKSTSGGTAALGCLVKDYFPEPVTVSWNSGALTSGVHTFPAVLQSSGLYSLSSVVTVPSSSLGTQTYICNVNHKPSNTKVDKKVEPKSCDKTHTCPPCPAPELLGGPSVFLFPPKPKDTLMISRTPEVTCVVVDVSHEDPEVKFNWYVDGVEVHNAKTKPREEQYNSTYRVVSVLTVLHQDWLNGKEYKCKVSNKALPAPIEKTISKAKGQPREPQVYTLPPSREEMTKNQVSLTCLVKGFYPSDIAVEWESNGQPENNYKTTPPVLDSDGSFFLYSKLTVDKSRWQQGNVFSCSVMHEALHNHYTQKSLSLSPGKGGGGSGGGGSGGGGSMDGRFWIRVQESVMVPEGLCISVPCSFSYPRQDWTGSTPAYGYWFKAVTETTKGAPVATNHQSREVEMSTRGRFQLTGDPAKGNCSLVIRDAQMQDESQYFFRVERGSYVRYNFMNDGFFLKVTALTQKPDVYIPETLEPGQPVTVICVFNWAFEECPPPSFSWTGAALSSQGTKPTTSHFSVLSFTPRPQDHNTDLTCHVDFSRKGVSAQRTVRLRVAYAPRDLVISISRDNTPALEPQPQGNVPYLEAQKGQFLRLLCAADSQPPATLSWVLQNRVLSSSHPWGPRPLGLELPGVKAGDSGRYTCRAENRLGSQQRALDLSVQYPPENLRVMVSQANRTVLENLGNGTSLPVLEGQSLCLVCVTHSSPPARLSWTQRGQVLSPSQPSDPGVLELPRVQVEHEGEFTCHARHPLGSQHVSLSLSVHYSPKLLGPSCSWEAEGLHCSCSSQASPAPSLRWWLGEELLEGNSSQDSFEVTPSSAGPWANSSLSLHGGLSSGLRLRCEAWNVHGAQSGSILQLPDKKGLIST

SEQ ID NO: 477 - protein, 590 aa, Artificial Sequence
  Description of Artificial Sequence: Synthetic polypeptide
EVQLQQSGPGLVKPSQTLSLTCAISGDSVSSNSAAWNWIRQSPSRGLEWLGKTYYRFKWYSDYAVSVKGRITINPDTSKNQFSLQLNSVTPEDTAVFYCTRESTTYDLLAGPFDYWGQGTLVTVSSASTKGPSVFPLAPSSKSTSGGTAALGCLVKDYFPEPVTVSWNSGALTSGVHTFPAVLQSSGLYSLSSVVTVPSSSLGTQTYICNVNHKPSNTKVDKKVEPKSCDKTHTCPPCPAPELLGGPSVFLFPPKPKDTLMISRTPEVTCVVVDVSHEDPEVKFNWYVDGVEVHNAKTKPREEQYNSTYRVVSVLTVLHQDWLNGKEYKCKVSNKALPAPIEKTISKAKGQPREPQVYTLPPSREEMTKNQVSLTCLVKGFYPSDIAVEWESNGQPENNYKTTPPVLDSDGSFFLYSKLTVDKSRWQQGNVFSCSVMHEALHNHYTQKSLSLSPGKGGGGSGGGGSGGGGSEEELQVIQPDKSVLVAAGETATLRCTATSLIPVGPIQWFRGAGPGRELIYNQKEGHFPRVTTVSDLTKRNNMDFSIRIGNITPADAGTYYCVKFRKGSPDDVEFKSGAGTELSVRAKPS

SEQ ID NO: 478 - protein, 608 aa, Artificial Sequence
  Description of Artificial Sequence: Synthetic polypeptide
EVQLQQSGPGLVKPSQTLSLTCAISGDSVSSNSAAWNWIRQSPSRGLEWLGKTYYRFKWYSDYAVSVKGRITINPDTSKNQFSLQLNSVTPEDTAVFYCTRESTTYDLLAGPFDYWGQGTLVTVSSASTKGPSVFPLAPSSKSTSGGTAALGCLVKDYFPEPVTVSWNSGALTSGVHTFPAVLQSSGLYSLSSVVTVPSSSLGTQTYICNVNHKPSNTKVDKKVEPKSCDKTHTCPPCPAPELLGGPSVFLFPPKPKDTLMISRTPEVTCVVVDVSHEDPEVKFNWYVDGVEVHNAKTKPREEQYNSTYRVVSVLTVLHQDWLNGKEYKCKVSNKALPAPIEKTISKAKGQPREPQVYTLPPSREEMTKNQVSLTCLVKGFYPSDIAVEWESNGQPENNYKTTPPVLDSDGSFFLYSKLTVDKSRWQQGNVFSCSVMHEALHNHYTQKSLSLSPGKGGGGSGGGGSGGGGSTIPPHVQKSVNNDMIVTDNNGAVKFPQLCKFCDVRFSTCDNQKSCMSNCSITSICEKPQEVCVAVWRKNDENITLETVCHDPKLPYHDFILEDAASPKCIMKEKKKPGETFFMCSCSSDECNDNIIFSEEYNTSNPD

SEQ ID NO: 479 - protein, 652 aa, Artificial Sequence
  Description of Artificial Sequence: Synthetic polypeptide
EVQLQQSGPGLVKPSQTLSLTCAISGDSVSSNSAAWNWIRQSPSRGLEWLGKTYYRFKWYSDYAVSVKGRITINPDTSKNQFSLQLNSVTPEDTAVFYCTRESTTYDLLAGPFDYWGQGTLVTVSSASTKGPSVFPLAPSSKSTSGGTAALGCLVKDYFPEPVTVSWNSGALTSGVHTFPAVLQSSGLYSLSSVVTVPSSSLGTQTYICNVNHKPSNTKVDKKVEPKSCDKTHTCPPCPAPELLGGPSVFLFPPKPKDTLMISRTPEVTCVVVDVSHEDPEVKFNWYVDGVEVHNAKTKPREEQYNSTYRVVSVLTVLHQDWLNGKEYKCKVSNKALPAPIEKTISKAKGQPREPQVYTLPPSREEMTKNQVSLTCLVKGFYPSDIAVEWESNGQPENNYKTTPPVLDSDGSFFLYSKLTVDKSRWQQGNVFSCSVMHEALHNHYTQKSLSLSPGKGGGGSGGGGSGGGGSSEVEYRAEVGQNAYLPCFYTPAAPGNLVPVCWGKGACPVFECGNVVLRTDERDVNYWTSRYWLNGDFRKGDVSLTIENVTLADSGIYCCRIQIPGIMNDEKFNLKLVIKPAKVTPAPTRQRDFTAAFPRMLTTRGHGPAETQTLGSLPDINLTQISTLANELRDSRLANDLRDSGATIRIG

SEQ ID NO: 480 - protein, 676 aa, Artificial Sequence
  Description of Artificial Sequence: Synthetic polypeptide
EVQLQQSGPGLVKPSQTLSLTCAISGDSVSSNSAAWNWIRQSPSRGLEWLGKTYYRFKWYSDYAVSVKGRITINPDTSKNQFSLQLNSVTPEDTAVFYCTRESTTYDLLAGPFDYWGQGTLVTVSSASTKGPSVFPLAPSSKSTSGGTAALGCLVKDYFPEPVTVSWNSGALTSGVHTFPAVLQSSGLYSLSSVVTVPSSSLGTQTYICNVNHKPSNTKVDKKVEPKSCDKTHTCPPCPAPELLGGPSVFLFPPKPKDTLMISRTPEVTCVVVDVSHEDPEVKFNWYVDGVEVHNAKTKPREEQYNSTYRVVSVLTVLHQDWLNGKEYKCKVSNKALPAPIEKTISKAKGQPREPQVYTLPPSREEMTKNQVSLTCLVKGFYPSDIAVEWESNGQPENNYKTTPPVLDSDGSFFLYSKLTVDKSRWQQGNVFSCSVMHEALHNHYTQKSLSLSPGKGGGGSGGGGSGGGGSSDTGRPFVEMYSEIPEIIHMTEGRELVIPCRVTSPNITVTLKKFPLDTLIPDGKRIIWDSRKGFIISNATYKEIGLLTCEATVNGHLYKTNYLTHRQTNTIIDVVLSPSHGIELSVGEKLVLNCTARTELNVGIDFNWEYPSSKHQHKKLVNRDLKTQSGSEMKKFLSTLTIDGVTRSDQGLYTCAASSGLMTKKNSTFVRVHEK

SEQ ID NO: 481 - protein, 349 aa, Artificial Sequence
  Description of Artificial Sequence: Synthetic polypeptide
QSALTQPRSVSGSPGQSVTISCTGTSSDVGGYNYVSWYQQHPGKAPKLMIYDVSKRPSGVPDRFSGSKSGNTASLTISGLQAEDEADYYCSSYADSVVFGGGTKVTVLGQPKAAPSVTLFPPSSEELQANKATLVCLISDFYPGAVTVAWKADSSPVKAGVETTTPSKQSNNKYAASSYLSLTPEQWKSHKSYSCQVTHEGSTVEKTVAPTECSGGGGSGGGGSGGGGSKESCDVQLYIKRQSEHSILAGDPFELECPVKYCANRPHVTWCKLNGTTCVKLEDRQTSWKEEKNISFFILHFEPVLPNDNGSYRCSANFQSNLIESHSTTLYVTDVKSASERPSKDEMAS

SEQ ID NO: 482 - protein, 612 aa, Artificial Sequence
  Description of Artificial Sequence: Synthetic polypeptide
EVQLVESGGGLVQPGGSLRLSCAASGFTFSSYAMSWVRQAPGKGLEWVSAISVSGGSTYYADSVKGRFTISRDNSKNTLYLQMNSLRAEDTAVYYCAKANWGFFDYWGQGTLVTVSSASTKGPSVFPLAPSSKSTSGGTAALGCLVKDYFPEPVTVSWNSGALTSGVHTFPAVLQSSGLYSLSSVVTVPSSSLGTQTYICNVNHKPSNTKVDKKVEPKSCDKTHTCPPCPAPELLGGPSVFLFPPKPKDTLMISRTPEVTCVVVDVSHEDPEVKFNWYVDGVEVHNAKTKPREEQYNSTYRVVSVLTVLHQDWLNGKEYKCKVSNKALPAPIEKTISKAKGQPREPQVYTLPPSREEMTKNQVSLTCLVKGFYPSDIAVEWESNGQPENNYKTTPPVLDSDGSFFLYSKLTVDKSRWQQGNVFSCSVMHEALHNHYTQKSLSLSPGKGGGGSGGGGSGGGGSPGWFLDSPDRPWNPPTFSPALLVVTEGDNATFTCSFSNTSESFVLNWYRMSPSNQTDKLAAFPEDRSQPGQDCRFRVTQLPNGRDFHMSVVRARRNDSGTYLCGAISLAPKAQIKESLRAELRVTERRAEVPTAHPSPSPRPAGQFQTLV

SEQ ID NO: 483 - protein, 992 aa, Artificial Sequence
  Description of Artificial Sequence: Synthetic polypeptide
EVQLVESGGGLVQPGGSLRLSCAASGFTFSSYAMSWVRQAPGKGLEWVSAISVSGGSTYYADSVKGRFTISRDNSKNTLYLQMNSLRAEDTAVYYCAKANWGFFDYWGQGTLVTVSSASTKGPSVFPLAPSSKSTSGGTAALGCLVKDYFPEPVTVSWNSGALTSGVHTFPAVLQSSGLYSLSSVVTVPSSSLGTQTYICNVNHKPSNTKVDKKVEPKSCDKTHTCPPCPAPELLGGPSVFLFPPKPKDTLMISRTPEVTCVVVDVSHEDPEVKFNWYVDGVEVHNAKTKPREEQYNSTYRVVSVLTVLHQDWLNGKEYKCKVSNKALPAPIEKTISKAKGQPREPQVYTLPPSREEMTKNQVSLTCLVKGFYPSDIAVEWESNGQPENNYKTTPPVLDSDGSFFLYSKLTVDKSRWQQGNVFSCSVMHEALHNHYTQKSLSLSPGKGGGGSGGGGSGGGGSMDGRFWIRVQESVMVPEGLCISVPCSFSYPRQDWTGSTPAYGYWFKAVTETTKGAPVATNHQSREVEMSTRGRFQLTGDPAKGNCSLVIRDAQMQDESQYFFRVERGSYVRYNFMNDGFFLKVTALTQKPDVYIPETLEPGQPVTVICVFNWAFEECPPPSFSWTGAALSSQGTKPTTSHFSVLSFTPRPQDHNTDLTCHVDFSRKGVSAQRTVRLRVAYAPRDLVISISRDNTPALEPQPQGNVPYLEAQKGQFLRLLCAADSQPPATLSWVLQNRVLSSSHPWGPRPLGLELPGVKAGDSGRYTCRAENRLGSQQRALDLSVQYPPENLRVMVSQANRTVLENLGNGTSLPVLEGQSLCLVCVTHSSPPARLSWTQRGQVLSPSQPSDPGVLELPRVQVEHEGEFTCHARHPLGSQHVSLSLSVHYSPKLLGPSCSWEAEGLHCSCSSQASPAPSLRWWLGEELLEGNSSQDSFEVTPSSAGPWANSSLSLHGGLSSGLRLRCEAWNVHGAQSGSILQLPDKKGLIST

SEQ ID NO: 484 - protein, 581 aa, Artificial Sequence
  Description of Artificial Sequence: Synthetic polypeptide
EVQLVESGGGLVQPGGSLRLSCAASGFTFSSYAMSWVRQAPGKGLEWVSAISVSGGSTYYADSVKGRFTISRDNSKNTLYLQMNSLRAEDTAVYYCAKANWGFFDYWGQGTLVTVSSASTKGPSVFPLAPSSKSTSGGTAALGCLVKDYFPEPVTVSWNSGALTSGVHTFPAVLQSSGLYSLSSVVTVPSSSLGTQTYICNVNHKPSNTKVDKKVEPKSCDKTHTCPPCPAPELLGGPSVFLFPPKPKDTLMISRTPEVTCVVVDVSHEDPEVKFNWYVDGVEVHNAKTKPREEQYNSTYRVVSVLTVLHQDWLNGKEYKCKVSNKALPAPIEKTISKAKGQPREPQVYTLPPSREEMTKNQVSLTCLVKGFYPSDIAVEWESNGQPENNYKTTPPVLDSDGSFFLYSKLTVDKSRWQQGNVFSCSVMHEALHNHYTQKSLSLSPGKGGGGSGGGGSGGGGSEEELQVIQPDKSVLVAAGETATLRCTATSLIPVGPIQWFRGAGPGRELIYNQKEGHFPRVTTVSDLTKRNNMDFSIRIGNITPADAGTYYCVKFRKGSPDDVEFKSGAGTELSVRAKPS

SEQ ID NO: 485 - protein, 643 aa, Artificial Sequence
  Description of Artificial Sequence: Synthetic polypeptide
EVQLVESGGGLVQPGGSLRLSCAASGFTFSSYAMSWVRQAPGKGLEWVSAISVSGGSTYYADSVKGRFTISRDNSKNTLYLQMNSLRAEDTAVYYCAKANWGFFDYWGQGTLVTVSSASTKGPSVFPLAPSSKSTSGGTAALGCLVKDYFPEPVTVSWNSGALTSGVHTFPAVLQSSGLYSLSSVVTVPSSSLGTQTYICNVNHKPSNTKVDKKVEPKSCDKTHTCPPCPAPELLGGPSVFLFPPKPKDTLMISRTPEVTCVVVDVSHEDPEVKFNWYVDGVEVHNAKTKPREEQYNSTYRVVSVLTVLHQDWLNGKEYKCKVSNKALPAPIEKTISKAKGQPREPQVYTLPPSREEMTKNQVSLTCLVKGFYPSDIAVEWESNGQPENNYKTTPPVLDSDGSFFLYSKLTVDKSRWQQGNVFSCSVMHEALHNHYTQKSLSLSPGKGGGGSGGGGSGGGGSSEVEYRAEVGQNAYLPCFYTPAAPGNLVPVCWGKGACPVFECGNVVLRTDERDVNYWTSRYWLNGDFRKGDVSLTIENVTLADSGIYCCRIQIPGIMNDEKFNLKLVIKPAKVTPAPTRQRDFTAAFPRMLTTRGHGPAETQTLGSLPDINLTQISTLANELRDSRLANDLRDSGATIRIG

SEQ ID NO: 486 - protein, 379 aa, Artificial Sequence
  Description of Artificial Sequence: Synthetic polypeptide
QSALTQPRSVSGSPGQSVTISCTGTSSDVGGYNYVSWYQQHPGKAPKLMIYDVSKRPSGVPDRFSGSKSGNTASLTISGLQAEDEADYYCSSYADSVVFGGGTKVTVLGQPKAAPSVTLFPPSSEELQANKATLVCLISDFYPGAVTVAWKADSSPVKAGVETTTPSKQSNNKYAASSYLSLTPEQWKSHKSYSCQVTHEGSTVEKTVAPTECSGGGGSGGGGSGGGGSPGWFLDSPDRPWNPPTFSPALLVVTEGDNATFTCSFSNTSESFVLNWYRMSPSNQTDKLAAFPEDRSQPGQDCRFRVTQLPNGRDFHMSVVRARRNDSGTYLCGAISLAPKAQIKESLRAELRVTERRAEVPTAHPSPSPRPAGQFQTLV

SEQ ID NO: 487 - protein, 582 aa, Artificial Sequence
  Description of Artificial Sequence: Synthetic polypeptide
EVQLVESGGGLVQPGGSLRLSCAASGFTFSSYAMSWVRQAPGKGLEWVSAISVSGGSTYYADSVKGRFTISRDNSKNTLYLQMNSLRAEDTAVYYCAKANWGFFDYWGQGTLVTVSSASTKGPSVFPLAPSSKSTSGGTAALGCLVKDYFPEPVTVSWNSGALTSGVHTFPAVLQSSGLYSLSSVVTVPSSSLGTQTYICNVNHKPSNTKVDKKVEPKSCDKTHTCPPCPAPELLGGPSVFLFPPKPKDTLMISRTPEVTCVVVDVSHEDPEVKFNWYVDGVEVHNAKTKPREEQYNSTYRVVSVLTVLHQDWLNGKEYKCKVSNKALPAPIEKTISKAKGQPREPQVYTLPPSREEMTKNQVSLTCLVKGFYPSDIAVEWESNGQPENNYKTTPPVLDSDGSFFLYSKLTVDKSRWQQGNVFSCSVMHEALHNHYTQKSLSLSPGKGGGGSGGGGSGGGGSKESCDVQLYIKRQSEHSILAGDPFELECPVKYCANRPHVTWCKLNGTTCVKLEDRQTSWKEEKNISFFILHFEPVLPNDNGSYRCSANFQSNLIESHSTTLYVTDVKSASERPSKDEMAS

SEQ ID NO: 488 - protein, 759 aa, Artificial Sequence
  Description of Artificial Sequence: Synthetic polypeptide
QSALTQPRSVSGSPGQSVTISCTGTSSDVGGYNYVSWYQQHPGKAPKLMIYDVSKRPSGVPDRFSGSKSGNTASLTISGLQAEDEADYYCSSYADSVVFGGGTKVTVLGQPKAAPSVTLFPPSSEELQANKATLVCLISDFYPGAVTVAWKADSSPVKAGVETTTPSKQSNNKYAASSYLSLTPEQWKSHKSYSCQVTHEGSTVEKTVAPTECSGGGGSGGGGSGGGGSMDGRFWIRVQESVMVPEGLCISVPCSFSYPRQDWTGSTPAYGYWFKAVTETTKGAPVATNHQSREVEMSTRGRFQLTGDPAKGNCSLVIRDAQMQDESQYFFRVERGSYVRYNFMNDGFFLKVTALTQKPDVYIPETLEPGQPVTVICVFNWAFEECPPPSFSWTGAALSSQGTKPTTSHFSVLSFTPRPQDHNTDLTCHVDFSRKGVSAQRTVRLRVAYAPRDLVISISRDNTPALEPQPQGNVPYLEAQKGQFLRLLCAADSQPPATLSWVLQNRVLSSSHPWGPRPLGLELPGVKAGDSGRYTCRAENRLGSQQRALDLSVQYPPENLRVMVSQANRTVLENLGNGTSLPVLEGQSLCLVCVTHSSPPARLSWTQRGQVLSPSQPSDPGVLELPRVQVEHEGEFTCHARHPLGSQHVSLSLSVHYSPKLLGPSCSWEAEGLHCSCSSQASPAPSLRWWLGEELLEGNSSQDSFEVTPSSAGPWANSSLSLHGGLSSGLRLRCEAWNVHGAQSGSILQLPDKKGLIST

SEQ ID NO: 489 - protein, 348 aa, Artificial Sequence
  Description of Artificial Sequence: Synthetic polypeptide
QSALTQPRSVSGSPGQSVTISCTGTSSDVGGYNYVSWYQQHPGKAPKLMIYDVSKRPSGVPDRFSGSKSGNTASLTISGLQAEDEADYYCSSYADSVVFGGGTKVTVLGQPKAAPSVTLFPPSSEELQANKATLVCLISDFYPGAVTVAWKADSSPVKAGVETTTPSKQSNNKYAASSYLSLTPEQWKSHKSYSCQVTHEGSTVEKTVAPTECSGGGGSGGGGSGGGGSEEELQVIQPDKSVLVAAGETATLRCTATSLIPVGPIQWFRGAGPGRELIYNQKEGHFPRVTTVSDLTKRNNMDFSIRIGNITPADAGTYYCVKFRKGSPDDVEFKSGAGTELSVRAKPS

SEQ ID NO: 490 - protein, 366 aa, Artificial Sequence
  Description of Artificial Sequence: Synthetic polypeptide
QSALTQPRSVSGSPGQSVTISCTGTSSDVGGYNYVSWYQQHPGKAPKLMIYDVSKRPSGVPDRFSGSKSGNTASLTISGLQAEDEADYYCSSYADSVVFGGGTKVTVLGQPKAAPSVTLFPPSSEELQANKATLVCLISDFYPGAVTVAWKADSSPVKAGVETTTPSKQSNNKYAASSYLSLTPEQWKSHKSYSCQVTHEGSTVEKTVAPTECSGGGGSGGGGSGGGGSTIPPHVQKSVNNDMIVTDNNGAVKFPQLCKFCDVRFSTCDNQKSCMSNCSITSICEKPQEVCVAVWRKNDENITLETVCHDPKLPYHDFILEDAASPKCIMKEKKKPGETFFMCSCSSDECNDNIIFSEEYNTSNPD

SEQ ID NO: 491 - protein, 410 aa, Artificial Sequence
  Description of Artificial Sequence: Synthetic polypeptide
QSALTQPRSVSGSPGQSVTISCTGTSSDVGGYNYVSWYQQHPGKAPKLMIYDVSKRPSGVPDRFSGSKSGNTASLTISGLQAEDEADYYCSSYADSVVFGGGTKVTVLGQPKAAPSVTLFPPSSEELQANKATLVCLISDFYPGAVTVAWKADSSPVKAGVETTTPSKQSNNKYAASSYLSLTPEQWKSHKSYSCQVTHEGSTVEKTVAPTECSGGGGSGGGGSGGGGSSEVEYRAEVGQNAYLPCFYTPAAPGNLVPVCWGKGACPVFECGNVVLRTDERDVNYWTSRYWLNGDFRKGDVSLTIENVTLADSGIYCCRIQIPGIMNDEKFNLKLVIKPAKVTPAPTRQRDFTAAFPRMLTTRGHGPAETQTLGSLPDINLTQISTLANELRDSRLANDLRDSGATIRIG

SEQ ID NO: 492 - protein, 434 aa, Artificial Sequence
  Description of Artificial Sequence: Synthetic polypeptide
QSALTQPRSVSGSPGQSVTISCTGTSSDVGGYNYVSWYQQHPGKAPKLMIYDVSKRPSGVPDRFSGSKSGNTASLTISGLQAEDEADYYCSSYADSVVFGGGTKVTVLGQPKAAPSVTLFPPSSEELQANKATLVCLISDFYPGAVTVAWKADSSPVKAGVETTTPSKQSNNKYAASSYLSLTPEQWKSHKSYSCQVTHEGSTVEKTVAPTECSGGGGSGGGGSGGGGSSDTGRPFVEMYSEIPEIIHMTEGRELVIPCRVTSPNITVTLKKFPLDTLIPDGKRIIWDSRKGFIISNATYKEIGLLTCEATVNGHLYKTNYLTHRQTNTIIDVVLSPSHGIELSVGEKLVLNCTARTELNVGIDFNWEYPSSKHQHKKLVNRDLKTQSGSEMKKFLSTLTIDGVTRSDQGLYTCAASSGLMTKKNSTFVRVHEK

SEQ ID NO: 493 - protein, 583 aa, Artificial Sequence
  Description of Artificial Sequence: Synthetic polypeptide
QVQLQQWGAGLLKPSETLSLTCAVYGGSFSGYYWSWIRQSPEKGLEWIGEINHGGYVTYNPSLESRVTISVDTSKNQFSLKLSSVTAADTAVYYCARDYGPGNYDWYFDLWGRGTLVTVSSASTKGPSVFPLAPCSRSTSESTAALGCLVKDYFPEPVTVSWNSGALTSGVHTFPAVLQSSGLYSLSSVVTVPSSSLGTKTYTCNVDHKPSNTKVDKRVESKYGPPCPPCPAPEFLGGPSVFLFPPKPKDTLMISRTPEVTCVVVDVSQEDPEVQFNWYVDGVEVHNAKTKPREEQFNSTYRVVSVLTVLHQDWLNGKEYKCKVSNKGLPSSIEKTISKAKGQPREPQVYTLPPSQEEMTKNQVSLTCLVKGFYPSDIAVEWESNGQPENNYKTTPPVLDSDGSFFLYSRLTVDKSRWQEGNVFSCSVMHEALHNHYTQKSLSLSLGKGGGGSGGGGSGGGGSKESCDVQLYIKRQSEHSILAGDPFELECPVKYCANRPHVTWCKLNGTTCVKLEDRQTSWKEEKNISFFILHFEPVLPNDNGSYRCSANFQSNLIESHSTTLYVTDVKSASERPSKDEMAS

SEQ ID NO: 494 - protein, 381 aa, Artificial Sequence
  Description of Artificial Sequence: Synthetic polypeptide
EIVLTQSPATLSLSPGERATLSCRASQSVSSYLAWYQQKPGQAPRLLIYDASNRATGIPARFSGSGSGTDFTLTISSLEPEDFAVYYCQQRSNWPPALTFCGGTKVEIKRTVAAPSVFIFPPSDEQLKSGTASVVCLLNNFYPREAKVQWKVDNALQSGNSQESVTEQDSKDSTYSLSSTLTLSKADYEKHKVYACEVTHQGLSSPVTKSFNRGECGGGGSGGGGSGGGGSPGWFLDSPDRPWNPPTFSPALLVVTEGDNATFTCSFSNTSESFVLNWYRMSPSNQTDKLAAFPEDRSQPGQDCRFRVTQLPNGRDFHMSVVRARRNDSGTYLCGAISLAPKAQIKESLRAELRVTERRAEVPTAHPSPSPRPAGQFQTLV

SEQ ID NO: 495 - protein, 761 aa, Artificial Sequence
  Description of Artificial Sequence: Synthetic polypeptide
EIVLTQSPATLSLSPGERATLSCRASQSVSSYLAWYQQKPGQAPRLLIYDASNRATGIPARFSGSGSGTDFTLTISSLEPEDFAVYYCQQRSNWPPALTFCGGTKVEIKRTVAAPSVFIFPPSDEQLKSGTASVVCLLNNFYPREAKVQWKVDNALQSGNSQESVTEQDSKDSTYSLSSTLTLSKADYEKHKVYACEVTHQGLSSPVTKSFNRGECGGGGSGGGGSGGGGSMDGRFWIRVQESVMVPEGLCISVPCSFSYPRQDWTGSTPAYGYWFKAVTETTKGAPVATNHQSREVEMSTRGRFQLTGDPAKGNCSLVIRDAQMQDESQYFFRVERGSYVRYNFMNDGFFLKVTALTQKPDVYIPETLEPGQPVTVICVFNWAFEECPPPSFSWTGAALSSQGTKPTTSHFSVLSFTPRPQDHNTDLTCHVDFSRKGVSAQRTVRLRVAYAPRDLVISISRDNTPALEPQPQGNVPYLEAQKGQFLRLLCAADSQPPATLSWVLQNRVLSSSHPWGPRPLGLELPGVKAGDSGRYTCRAENRLGSQQRALDLSVQYPPENLRVMVSQANRTVLENLGNGTSLPVLEGQSLCLVCVTHSSPPARLSWTQRGQVLSPSQPSDPGVLELPRVQVEHEGEFTCHARHPLGSQHVSLSLSVHYSPKLLGPSCSWEAEGLHCSCSSQASPAPSLRWWLGEELLEGNSSQDSFEVTPSSAGPWANSSLSLHGGLSSGLRLRCEAWNVHGAQSGSILQLPDKKGLIST

SEQ ID NO: 496 - protein, 350 aa, Artificial Sequence
  Description of Artificial Sequence: Synthetic polypeptide
EIVLTQSPATLSLSPGERATLSCRASQSVSSYLAWYQQKPGQAPRLLIYDASNRATGIPARFSGSGSGTDFTLTISSLEPEDFAVYYCQQRSNWPPALTFCGGTKVEIKRTVAAPSVFIFPPSDEQLKSGTASVVCLLNNFYPREAKVQWKVDNALQSGNSQESVTEQDSKDSTYSLSSTLTLSKADYEKHKVYACEVTHQGLSSPVTKSFNRGECGGGGSGGGGSGGGGSEEELQVIQPDKSVLVAAGETATLRCTATSLIPVGPIQWFRGAGPGRELIYNQKEGHFPRVTTVSDLTKRNNMDFSIRIGNITPADAGTYYCVKFRKGSPDDVEFKSGAGTELSVRAKPS

SEQ ID NO: 497 - protein, 412 aa, Artificial Sequence
  Description of Artificial Sequence: Synthetic polypeptide
EIVLTQSPATLSLSPGERATLSCRASQSVSSYLAWYQQKPGQAPRLLIYDASNRATGIPARFSGSGSGTDFTLTISSLEPEDFAVYYCQQRSNWPPALTFCGGTKVEIKRTVAAPSVFIFPPSDEQLKSGTASVVCLLNNFYPREAKVQWKVDNALQSGNSQESVTEQDSKDSTYSLSSTLTLSKADYEKHKVYACEVTHQGLSSPVTKSFNRGECGGGGSGGGGSGGGGSSEVEYRAEVGQNAYLPCFYTPAAPGNLVPVCWGKGACPVFECGNVVLRTDERDVNYWTSRYWLNGDFRKGDVSLTIENVTLADSGIYCCRIQIPGIMNDEKFNLKLVIKPAKVTPAPTRQRDFTAAFPRMLTTRGHGPAETQTLGSLPDINLTQISTLANELRDSRLANDLRDSGATIRIG

SEQ ID NO: 498 - protein, 613 aa, Artificial Sequence
  Description of Artificial Sequence: Synthetic polypeptide
QVQLQQWGAGLLKPSETLSLTCAVYGGSFSGYYWSWIRQSPEKGLEWIGEINHGGYVTYNPSLESRVTISVDTSKNQFSLKLSSVTAADTAVYYCARDYGPGNYDWYFDLWGRGTLVTVSSASTKGPSVFPLAPCSRSTSESTAALGCLVKDYFPEPVTVSWNSGALTSGVHTFPAVLQSSGLYSLSSVVTVPSSSLGTKTYTCNVDHKPSNTKVDKRVESKYGPPCPPCPAPEFLGGPSVFLFPPKPKDTLMISRTPEVTCVVVDVSQEDPEVQFNWYVDGVEVHNAKTKPREEQFNSTYRVVSVLTVLHQDWLNGKEYKCKVSNKGLPSSIEKTISKAKGQPREPQVYTLPPSQEEMTKNQVSLTCLVKGFYPSDIAVEWESNGQPENNYKTTPPVLDSDGSFFLYSRLTVDKSRWQEGNVFSCSVMHEALHNHYTQKSLSLSLGKGGGGSGGGGSGGGGSPGWFLDSPDRPWNPPTFSPALLVVTEGDNATFTCSFSNTSESFVLNWYRMSPSNQTDKLAAFPEDRSQPGQDCRFRVTQLPNGRDFHMSVVRARRNDSGTYLCGAISLAPKAQIKESLRAELRVTERRAEVPTAHPSPSPRPAGQFQTLV

SEQ ID NO: 499 - protein, 351 aa, Artificial Sequence
  Description of Artificial Sequence: Synthetic polypeptide
EIVLTQSPATLSLSPGERATLSCRASQSVSSYLAWYQQKPGQAPRLLIYDASNRATGIPARFSGSGSGTDFTLTISSLEPEDFAVYYCQQRSNWPPALTFCGGTKVEIKRTVAAPSVFIFPPSDEQLKSGTASVVCLLNNFYPREAKVQWKVDNALQSGNSQESVTEQDSKDSTYSLSSTLTLSKADYEKHKVYACEVTHQGLSSPVTKSFNRGECGGGGSGGGGSGGGGSKESCDVQLYIKRQSEHSILAGDPFELECPVKYCANRPHVTWCKLNGTTCVKLEDRQTSWKEEKNISFFILHFEPVLPNDNGSYRCSANFQSNLIESHSTTLYVTDVKSASERPSKDEMAS

SEQ ID NO: 500 - protein, 993 aa, Artificial Sequence
  Description of Artificial Sequence: Synthetic polypeptide
QVQLQQWGAGLLKPSETLSLTCAVYGGSFSGYYWSWIRQSPEKGLEWIGEINHGGYVTYNPSLESRVTISVDTSKNQFSLKLSSVTAADTAVYYCARDYGPGNYDWYFDLWGRGTLVTVSSASTKGPSVFPLAPCSRSTSESTAALGCLVKDYFPEPVTVSWNSGALTSGVHTFPAVLQSSGLYSLSSVVTVPSSSLGTKTYTCNVDHKPSNTKVDKRVESKYGPPCPPCPAPEFLGGPSVFLFPPKPKDTLMISRTPEVTCVVVDVSQEDPEVQFNWYVDGVEVHNAKTKPREEQFNSTYRVVSVLTVLHQDWLNGKEYKCKVSNKGLPSSIEKTISKAKGQPREPQVYTLPPSQEEMTKNQVSLTCLVKGFYPSDIAVEWESNGQPENNYKTTPPVLDSDGSFFLYSRLTVDKSRWQEGNVFSCSVMHEALHNHYTQKSLSLSLGKGGGGSGGGGSGGGGSMDGRFWIRVQESVMVPEGLCISVPCSFSYPRQDWTGSTPAYGYWFKAVTETTKGAPVATNHQSREVEMSTRGRFQLTGDPAKGNCSLVIRDAQMQDESQYFFRVERGSYVRYNFMNDGFFLKVTALTQKPDVYIPETLEPGQPVTVICVFNWAFEECPPPSFSWTGAALSSQGTKPTTSHFSVLSFTPRPQDHNTDLTCHVDFSRKGVSAQRTVRLRVAYAPRDLVISISRDNTPALEPQPQGNVPYLEAQKGQFLRLLCAADSQPPATLSWVLQNRVLSSSHPWGPRPLGLELPGVKAGDSGRYTCRAENRLGSQQRALDLSVQYPPENLRVMVSQANRTVLENLGNGTSLPVLEGQSLCLVCVTHSSPPARLSWTQRGQVLSPSQPSDPGVLELPRVQVEHEGEFTCHARHPLGSQHVSLSLSVHYSPKLLGPSCSWEAEGLHCSCSSQASPAPSLRWWLGEELLEGNSSQDSFEVTPSSAGPWANSSLSLHGGLSSGLRLRCEAWNVHGAQSGSILQLPDKKGLIST

SEQ ID NO: 501 - protein, 582 aa, Artificial Sequence
  Description of Artificial Sequence: Synthetic polypeptide
QVQLQQWGAGLLKPSETLSLTCAVYGGSFSGYYWSWIRQSPEKGLEWIGEINHGGYVTYNPSLESRVTISVDTSKNQFSLKLSSVTAADTAVYYCARDYGPGNYDWYFDLWGRGTLVTVSSASTKGPSVFPLAPCSRSTSESTAALGCLVKDYFPEPVTVSWNSGALTSGVHTFPAVLQSSGLYSLSSVVTVPSSSLGTKTYTCNVDHKPSNTKVDKRVESKYGPPCPPCPAPEFLGGPSVFLFPPKPKDTLMISRTPEVTCVVVDVSQEDPEVQFNWYVDGVEVHNAKTKPREEQFNSTYRVVSVLTVLHQDWLNGKEYKCKVSNKGLPSSIEKTISKAKGQPREPQVYTLPPSQEEMTKNQVSLTCLVKGFYPSDIAVEWESNGQPENNYKTTPPVLDSDGSFFLYSRLTVDKSRWQEGNVFSCSVMHEALHNHYTQKSLSLSLGKGGGGSGGGGSGGGGSEEELQVIQPDKSVLVAAGETATLRCTATSLIPVGPIQWFRGAGPGRELIYNQKEGHFPRVTTVSDLTKRNNMDFSIRIGNITPADAGTYYCVKFRKGSPDDVEFKSGAGTELSVRAKPS

SEQ ID NO: 502 - protein, 600 aa, Artificial Sequence
  Description of Artificial Sequence: Synthetic polypeptide
QVQLQQWGAGLLKPSETLSLTCAVYGGSFSGYYWSWIRQSPEKGLEWIGEINHGGYVTYNPSLESRVTISVDTSKNQFSLKLSSVTAADTAVYYCARDYGPGNYDWYFDLWGRGTLVTVSSASTKGPSVFPLAPCSRSTSESTAALGCLVKDYFPEPVTVSWNSGALTSGVHTFPAVLQSSGLYSLSSVVTVPSSSLGTKTYTCNVDHKPSNTKVDKRVESKYGPPCPPCPAPEFLGGPSVFLFPPKPKDTLMISRTPEVTCVVVDVSQEDPEVQFNWYVDGVEVHNAKTKPREEQFNSTYRVVSVLTVLHQDWLNGKEYKCKVSNKGLPSSIEKTISKAKGQPREPQVYTLPPSQEEMTKNQVSLTCLVKGFYPSDIAVEWESNGQPENNYKTTPPVLDSDGSFFLYSRLTVDKSRWQEGNVFSCSVMHEALHNHYTQKSLSLSLGKGGGGSGGGGSGGGGSTIPPHVQKSVNNDMIVTDNNGAVKFPQLCKFCDVRFSTCDNQKSCMSNCSITSICEKPQEVCVAVWRKNDENITLETVCHDPKLPYHDFILEDAASPKCIMKEKKKPGETFFMCSCSSDECNDNIIFSEEYNTSNPD

SEQ ID NO: 503 - protein, 644 aa, Artificial Sequence
  Description of Artificial Sequence: Synthetic polypeptide
QVQLQQWGAGLLKPSETLSLTCAVYGGSFSGYYWSWIRQSPEKGLEWIGEINHGGYVTYNPSLESRVTISVDTSKNQFSLKLSSVTAADTAVYYCARDYGPGNYDWYFDLWGRGTLVTVSSASTKGPSVFPLAPCSRSTSESTAALGCLVKDYFPEPVTVSWNSGALTSGVHTFPAVLQSSGLYSLSSVVTVPSSSLGTKTYTCNVDHKPSNTKVDKRVESKYGPPCPPCPAPEFLGGPSVFLFPPKPKDTLMISRTPEVTCVVVDVSQEDPEVQFNWYVDGVEVHNAKTKPREEQFNSTYRVVSVLTVLHQDWLNGKEYKCKVSNKGLPSSIEKTISKAKGQPREPQVYTLPPSQEEMTKNQVSLTCLVKGFYPSDIAVEWESNGQPENNYKTTPPVLDSDGSFFLYSRLTVDKSRWQEGNVFSCSVMHEALHNHYTQKSLSLSLGKGGGGSGGGGSGGGGSSEVEYRAEVGQNAYLPCFYTPAAPGNLVPVCWGKGACPVFECGNVVLRTDERDVNYWTSRYWLNGDFRKGDVSLTIENVTLADSGIYCCRIQIPGIMNDEKFNLKLVIKPAKVTPAPTRQRDFTAAFPRMLTTRGHGPAETQTLGSLPDINLTQISTLANELRDSRLANDLRDSGATIRIG

SEQ ID NO: 504 - protein, 668 aa, Artificial Sequence
  Description of Artificial Sequence: Synthetic polypeptide
QVQLQQWGAGLLKPSETLSLTCAVYGGSFSGYYWSWIRQSPEKGLEWIGEINHGGYVTYNPSLESRVTISVDTSKNQFSLKLSSVTAADTAVYYCARDYGPGNYDWYFDLWGRGTLVTVSSASTKGPSVFPLAPCSRSTSESTAALGCLVKDYFPEPVTVSWNSGALTSGVHTFPAVLQSSGLYSLSSVVTVPSSSLGTKTYTCNVDHKPSNTKVDKRVESKYGPPCPPCPAPEFLGGPSVFLFPPKPKDTLMISRTPEVTCVVVDVSQEDPEVQFNWYVDGVEVHNAKTKPREEQFNSTYRVVSVLTVLHQDWLNGKEYKCKVSNKGLPSSIEKTISKAKGQPREPQVYTLPPSQEEMTKNQVSLTCLVKGFYPSDIAVEWESNGQPENNYKTTPPVLDSDGSFFLYSRLTVDKSRWQEGNVFSCSVMHEALHNHYTQKSLSLSLGKGGGGSGGGGSGGGGSSDTGRPFVEMYSEIPEIIHMTEGRELVIPCRVTSPNITVTLKKFPLDTLIPDGKRIIWDSRKGFIISNATYKEIGLLTCEATVNGHLYKTNYLTHRQTNTIIDVVLSPSHGIELSVGEKLVLNCTARTELNVGIDFNWEYPSSKHQHKKLVNRDLKTQSGSEMKKFLSTLTIDGVTRSDQGLYTCAASSGLMTKKNSTFVRVHEK

SEQ ID NO: 505 - protein, 587 aa, Artificial Sequence
  Description of Artificial Sequence: Synthetic polypeptide
QVQLVQSGSELKKPGASVKVSCKASGYTFTDYSMHWVRQAPGQGLKWMGWINTETGEPTYADDFKGRFVFSLDTSVSTAYLQISSLKAEDTAVYYCANPYYDYVSYYAMDYWGQGTTVTVSSASTKGPSVFPLAPSSKSTSGGTAALGCLVKDYFPEPVTVSWNSGALTSGVHTFPAVLQSSGLYSLSSVVTVPSSSLGTQTYICNVNHKPSNTKVDKKVEPKSCDKTHTCPPCPAPEAAGGPSVFLFPPKPKDTLMISRTPEVTCVVVDVSHEDPEVKFNWYVDGVEVHNAKTKPREEQYNSTYRVVSVLTVLHQDWLNGKEYKCKVSNKALPAPIEKTISKAKGQPREPQVYTLPPSREEMTKNQVSLTCLVKGFYPSDIAVEWESNGQPENNYKTTPPVLDSDGSFFLYSKLTVDKSRWQQGNVFSCSVMHEALHNHYTQKSLSLSPGKGGGGSGGGGSGGGGSKESCDVQLYIKRQSEHSILAGDPFELECPVKYCANRPHVTWCKLNGTTCVKLEDRQTSWKEEKNISFFILHFEPVLPNDNGSYRCSANFQSNLIESHSTTLYVTDVKSASERPSKDEMAS

SEQ ID NO: 506 - protein, 379 aa, Artificial Sequence
  Description of Artificial Sequence: Synthetic polypeptide
DIQMTQSPSSLSASVGDRVTITCKASQDVSTAVAWYQQKPGKAPKLLIYSASYLYTGVPSRFSGSGSGTDFTFTISSLQPEDIATYYCQQHYSTPRTFGQGTKLEIKRTVAAPSVFIFPPSDEQLKSGTASVVCLLNNFYPREAKVQWKVDNALQSGNSQESVTEQDSKDSTYSLSSTLTLSKADYEKHKVYACEVTHQGLSSPVTKSFNRGECGGGGSGGGGSGGGGSPGWFLDSPDRPWNPPTFSPALLVVTEGDNATFTCSFSNTSESFVLNWYRMSPSNQTDKLAAFPEDRSQPGQDCRFRVTQLPNGRDFHMSVVRARRNDSGTYLCGAISLAPKAQIKESLRAELRVTERRAEVPTAHPSPSPRPAGQFQTLV

SEQ ID NO: 507 - protein, 759 aa, Artificial Sequence
  Description of Artificial Sequence: Synthetic polypeptide
DIQMTQSPSSLSASVGDRVTITCKASQDVSTAVAWYQQKPGKAPKLLIYSASYLYTGVPSRFSGSGSGTDFTFTISSLQPEDIATYYCQQHYSTPRTFGQGTKLEIKRTVAAPSVFIFPPSDEQLKSGTASVVCLLNNFYPREAKVQWKVDNALQSGNSQESVTEQDSKDSTYSLSSTLTLSKADYEKHKVYACEVTHQGLSSPVTKSFNRGECGGGGSGGGGSGGGGSMDGRFWIRVQESVMVPEGLCISVPCSFSYPRQDWTGSTPAYGYWFKAVTETTKGAPVATNHQSREVEMSTRGRFQLTGDPAKGNCSLVIRDAQMQDESQYFFRVERGSYVRYNFMNDGFFLKVTALTQKPDVYIPETLEPGQPVTVICVFNWAFEECPPPSFSWTGAALSSQGTKPTTSHFSVLSFTPRPQDHNTDLTCHVDFSRKGVSAQRTVRLRVAYAPRDLVISISRDNTPALEPQPQGNVPYLEAQKGQFLRLLCAADSQPPATLSWVLQNRVLSSSHPWGPRPLGLELPGVKAGDSGRYTCRAENRLGSQQRALDLSVQYPPENLRVMVSQANRTVLENLGNGTSLPVLEGQSLCLVCVTHSSPPARLSWTQRGQVLSPSQPSDPGVLELPRVQVEHEGEFTCHARHPLGSQHVSLSLSVHYSPKLLGPSCSWEAEGLHCSCSSQASPAPSLRWWLGEELLEGNSSQDSFEVTPSSAGPWANSSLSLHGGLSSGLRLRCEAWNVHGAQSGSILQLPDKKGLIST

SEQ ID NO: 508 - protein, 348 aa, Artificial Sequence
  Description of Artificial Sequence: Synthetic polypeptide
DIQMTQSPSSLSASVGDRVTITCKASQDVSTAVAWYQQKPGKAPKLLIYSASYLYTGVPSRFSGSGSGTDFTFTISSLQPEDIATYYCQQHYSTPRTFGQGTKLEIKRTVAAPSVFIFPPSDEQLKSGTASVVCLLNNFYPREAKVQWKVDNALQSGNSQESVTEQDSKDSTYSLSSTLTLSKADYEKHKVYACEVTHQGLSSPVTKSFNRGECGGGGSGGGGSGGGGSEEELQVIQPDKSVLVAAGETATLRCTATSLIPVGPIQWFRGAGPGRELIYNQKEGHFPRVTTVSDLTKRNNMDFSIRIGNITPADAGTYYCVKFRKGSPDDVEFKSGAGTELSVRAKPS

SEQ ID NO: 509 - protein, 410 aa, Artificial Sequence
  Description of Artificial Sequence: Synthetic polypeptide
DIQMTQSPSSLSASVGDRVTITCKASQDVSTAVAWYQQKPGKAPKLLIYSASYLYTGVPSRFSGSGSGTDFTFTISSLQPEDIATYYCQQHYSTPRTFGQGTKLEIKRTVAAPSVFIFPPSDEQLKSGTASVVCLLNNFYPREAKVQWKVDNALQSGNSQESVTEQDSKDSTYSLSSTLTLSKADYEKHKVYACEVTHQGLSSPVTKSFNRGECGGGGSGGGGSGGGGSSEVEYRAEVGQNAYLPCFYTPAAPGNLVPVCWGKGACPVFECGNVVLRTDERDVNYWTSRYWLNGDFRKGDVSLTIENVTLADSGIYCCRIQIPGIMNDEKFNLKLVIKPAKVTPAPTRQRDFTAAFPRMLTTRGHGPAETQTLGSLPDINLTQISTLANELRDSRLANDLRDSGATIRIG

SEQ ID NO: 510 - protein, 617 aa, Artificial Sequence
  Description of Artificial Sequence: Synthetic polypeptide
QVQLVQSGSELKKPGASVKVSCKASGYTFTDYSMHWVRQAPGQGLKWMGWINTETGEPTYADDFKGRFVFSLDTSVSTAYLQISSLKAEDTAVYYCANPYYDYVSYYAMDYWGQGTTVTVSSASTKGPSVFPLAPSSKSTSGGTAALGCLVKDYFPEPVTVSWNSGALTSGVHTFPAVLQSSGLYSLSSVVTVPSSSLGTQTYICNVNHKPSNTKVDKKVEPKSCDKTHTCPPCPAPEAAGGPSVFLFPPKPKDTLMISRTPEVTCVVVDVSHEDPEVKFNWYVDGVEVHNAKTKPREEQYNSTYRVVSVLTVLHQDWLNGKEYKCKVSNKALPAPIEKTISKAKGQPREPQVYTLPPSREEMTKNQVSLTCLVKGFYPSDIAVEWESNGQPENNYKTTPPVLDSDGSFFLYSKLTVDKSRWQQGNVFSCSVMHEALHNHYTQKSLSLSPGKGGGGSGGGGSGGGGSPGWFLDSPDRPWNPPTFSPALLVVTEGDNATFTCSFSNTSESFVLNWYRMSPSNQTDKLAAFPEDRSQPGQDCRFRVTQLPNGRDFHMSVVRARRNDSGTYLCGAISLAPKAQIKESLRAELRVTERRAEVPTAHPSPSPRPAGQFQTLV

SEQ ID NO: 511 - protein, 349 aa, Artificial Sequence
  Description of Artificial Sequence: Synthetic polypeptide
DIQMTQSPSSLSASVGDRVTITCKASQDVSTAVAWYQQKPGKAPKLLIYSASYLYTGVPSRFSGSGSGTDFTFTISSLQPEDIATYYCQQHYSTPRTFGQGTKLEIKRTVAAPSVFIFPPSDEQLKSGTASVVCLLNNFYPREAKVQWKVDNALQSGNSQESVTEQDSKDSTYSLSSTLTLSKADYEKHKVYACEVTHQGLSSPVTKSFNRGECGGGGSGGGGSGGGGSKESCDVQLYIKRQSEHSILAGDPFELECPVKYCANRPHVTWCKLNGTTCVKLEDRQTSWKEEKNISFFILHFEPVLPNDNGSYRCSANFQSNLIESHSTTLYVTDVKSASERPSKDEMAS

SEQ ID NO: 512 - protein, 997 aa, Artificial Sequence
  Description of Artificial Sequence: Synthetic polypeptide
QVQLVQSGSELKKPGASVKVSCKASGYTFTDYSMHWVRQAPGQGLKWMGWINTETGEPTYADDFKGRFVFSLDTSVSTAYLQISSLKAEDTAVYYCANPYYDYVSYYAMDYWGQGTTVTVSSASTKGPSVFPLAPSSKSTSGGTAALGCLVKDYFPEPVTVSWNSGALTSGVHTFPAVLQSSGLYSLSSVVTVPSSSLGTQTYICNVNHKPSNTKVDKKVEPKSCDKTHTCPPCPAPEAAGGPSVFLFPPKPKDTLMISRTPEVTCVVVDVSHEDPEVKFNWYVDGVEVHNAKTKPREEQYNSTYRVVSVLTVLHQDWLNGKEYKCKVSNKALPAPIEKTISKAKGQPREPQVYTLPPSREEMTKNQVSLTCLVKGFYPSDIAVEWESNGQPENNYKTTPPVLDSDGSFFLYSKLTVDKSRWQQGNVFSCSVMHEALHNHYTQKSLSLSPGKGGGGSGGGGSGGGGSMDGRFWIRVQESVMVPEGLCISVPCSFSYPRQDWTGSTPAYGYWFKAVTETTKGAPVATNHQSREVEMSTRGRFQLTGDPAKGNCSLVIRDAQMQDESQYFFRVERGSYVRYNFMNDGFFLKVTALTQKPDVYIPETLEPGQPVTVICVFNWAFEECPPPSFSWTGAALSSQGTKPTTSHFSVLSFTPRPQDHNTDLTCHVDFSRKGVSAQRTVRLRVAYAPRDLVISISRDNTPALEPQPQGNVPYLEAQKGQFLRLLCAADSQPPATLSWVLQNRVLSSSHPWGPRPLGLELPGVKAGDSGRYTCRAENRLGSQQRALDLSVQYPPENLRVMVSQANRTVLENLGNGTSLPVLEGQSLCLVCVTHSSPPARLSWTQRGQVLSPSQPSDPGVLELPRVQVEHEGEFTCHARHPLGSQHVSLSLSVHYSPKLLGPSCSWEAEGLHCSCSSQASPAPSLRWWLGEELLEGNSSQDSFEVTPSSAGPWANSSLSLHGGLSSGLRLRCEAWNVHGAQSGSILQLPDKKGLIST

SEQ ID NO: 513 - protein, 586 aa, Artificial Sequence
  Description of Artificial Sequence: Synthetic polypeptide
QVQLVQSGSELKKPGASVKVSCKASGYTFTDYSMHWVRQAPGQGLKWMGWINTETGEPTYADDFKGRFVFSLDTSVSTAYLQISSLKAEDTAVYYCANPYYDYVSYYAMDYWGQGTTVTVSSASTKGPSVFPLAPSSKSTSGGTAALGCLVKDYFPEPVTVSWNSGALTSGVHTFPAVLQSSGLYSLSSVVTVPSSSLGTQTYICNVNHKPSNTKVDKKVEPKSCDKTHTCPPCPAPEAAGGPSVFLFPPKPKDTLMISRTPEVTCVVVDVSHEDPEVKFNWYVDGVEVHNAKTKPREEQYNSTYRVVSVLTVLHQDWLNGKEYKCKVSNKALPAPIEKTISKAKGQPREPQVYTLPPSREEMTKNQVSLTCLVKGFYPSDIAVEWESNGQPENNYKTTPPVLDSDGSFFLYSKLTVDKSRWQQGNVFSCSVMHEALHNHYTQKSLSLSPGKGGGGSGGGGSGGGGSEEELQVIQPDKSVLVAAGETATLRCTATSLIPVGPIQWFRGAGPGRELIYNQKEGHFPRVTTVSDLTKRNNMDFSIRIGNITPADAGTYYCVKFRKGSPDDVEFKSGAGTELSVRAKPS

SEQ ID NO: 514 - protein, 604 aa, Artificial Sequence
  Description of Artificial Sequence: Synthetic polypeptide
QVQLVQSGSELKKPGASVKVSCKASGYTFTDYSMHWVRQAPGQGLKWMGWINTETGEPTYADDFKGRFVFSLDTSVSTAYLQISSLKAEDTAVYYCANPYYDYVSYYAMDYWGQGTTVTVSSASTKGPSVFPLAPSSKSTSGGTAALGCLVKDYFPEPVTVSWNSGALTSGVHTFPAVLQSSGLYSLSSVVTVPSSSLGTQTYICNVNHKPSNTKVDKKVEPKSCDKTHTCPPCPAPEAAGGPSVFLFPPKPKDTLMISRTPEVTCVVVDVSHEDPEVKFNWYVDGVEVHNAKTKPREEQYNSTYRVVSVLTVLHQDWLNGKEYKCKVSNKALPAPIEKTISKAKGQPREPQVYTLPPSREEMTKNQVSLTCLVKGFYPSDIAVEWESNGQPENNYKTTPPVLDSDGSFFLYSKLTVDKSRWQQGNVFSCSVMHEALHNHYTQKSLSLSPGKGGGGSGGGGSGGGGSTIPPHVQKSVNNDMIVTDNNGAVKFPQLCKFCDVRFSTCDNQKSCMSNCSITSICEKPQEVCVAVWRKNDENITLETVCHDPKLPYHDFILEDAASPKCIMKEKKKPGETFFMCSCSSDECNDNIIFSEEYNTSNPD

SEQ ID NO: 515 - protein, 648 aa, Artificial Sequence
  Description of Artificial Sequence: Synthetic polypeptide
QVQLVQSGSELKKPGASVKVSCKASGYTFTDYSMHWVRQAPGQGLKWMGWINTETGEPTYADDFKGRFVFSLDTSVSTAYLQISSLKAEDTAVYYCANPYYDYVSYYAMDYWGQGTTVTVSSASTKGPSVFPLAPSSKSTSGGTAALGCLVKDYFPEPVTVSWNSGALTSGVHTFPAVLQSSGLYSLSSVVTVPSSSLGTQTYICNVNHKPSNTKVDKKVEPKSCDKTHTCPPCPAPEAAGGPSVFLFPPKPKDTLMISRTPEVTCVVVDVSHEDPEVKFNWYVDGVEVHNAKTKPREEQYNSTYRVVSVLTVLHQDWLNGKEYKCKVSNKALPAPIEKTISKAKGQPREPQVYTLPPSREEMTKNQVSLTCLVKGFYPSDIAVEWESNGQPENNYKTTPPVLDSDGSFFLYSKLTVDKSRWQQGNVFSCSVMHEALHNHYTQKSLSLSPGKGGGGSGGGGSGGGGSSEVEYRAEVGQNAYLPCFYTPAAPGNLVPVCWGKGACPVFECGNVVLRTDERDVNYWTSRYWLNGDFRKGDVSLTIENVTLADSGIYCCRIQIPGIMNDEKFNLKLVIKPAKVTPAPTRQRDFTAAFPRMLTTRGHGPAETQTLGSLPDINLTQISTLANELRDSRLANDLRDSGATIRIG

SEQ ID NO: 516 - protein, 672 aa, Artificial Sequence
  Description of Artificial Sequence: Synthetic polypeptide
QVQLVQSGSELKKPGASVKVSCKASGYTFTDYSMHWVRQAPGQGLKWMGWINTETGEPTYADDFKGRFVFSLDTSVSTAYLQISSLKAEDTAVYYCANPYYDYVSYYAMDYWGQGTTVTVSSASTKGPSVFPLAPSSKSTSGGTAALGCLVKDYFPEPVTVSWNSGALTSGVHTFPAVLQSSGLYSLSSVVTVPSSSLGTQTYICNVNHKPSNTKVDKKVEPKSCDKTHTCPPCPAPEAAGGPSVFLFPPKPKDTLMISRTPEVTCVVVDVSHEDPEVKFNWYVDGVEVHNAKTKPREEQYNSTYRVVSVLTVLHQDWLNGKEYKCKVSNKALPAPIEKTISKAKGQPREPQVYTLPPSREEMTKNQVSLTCLVKGFYPSDIAVEWESNGQPENNYKTTPPVLDSDGSFFLYSKLTVDKSRWQQGNVFSCSVMHEALHNHYTQKSLSLSPGKGGGGSGGGGSGGGGSSDTGRPFVEMYSEIPEIIHMTEGRELVIPCRVTSPNITVTLKKFPLDTLIPDGKRIIWDSRKGFIISNATYKEIGLLTCEATVNGHLYKTNYLTHRQTNTIIDVVLSPSHGIELSVGEKLVLNCTARTELNVGIDFNWEYPSSKHQHKKLVNRDLKTQSGSEMKKFLSTLTIDGVTRSDQGLYTCAASSGLMTKKNSTFVRVHEK

SEQ ID NO: 517 - protein, 586 aa, Artificial Sequence
  Description of Artificial Sequence: Synthetic polypeptide
QVQLVQSGAEVKKPGSSVKVSCKASGYTFTDYAMHWVRQAPGQGLEWMGLISIYSDHTNYNQKFQGRVTITADKSTSTAYMELSSLRSEDTAVYYCGRNNYGNYGWYFDVWGQGTTVTVSSASTKGPSVFPLAPSSKSTSGGTAALGCLVKDYFPEPVTVSWNSGALTSGVHTFPAVLQSSGLYSLSSVVTVPSSSLGTQTYICNVNHKPSNTKVDKKVEPKSCDKTHTCPPCPAPEAAGGPSVFLFPPKPKDTLMISRTPEVTCVVVDVSHEDPEVKFNWYVDGVEVHNAKTKPREEQYNSTYRVVSVLTVLHQDWLNGKEYKCKVSNKALPAPIEKTISKAKGQPREPQVYTLPPSREEMTKNQVSLTCLVKGFYPSDIAVEWESNGQPENNYKTTPPVLDSDGSFFLYSKLTVDKSRWQQGNVFSCSVMHEALHNHYTQKSLSLSPGKGGGGSGGGGSGGGGSKESCDVQLYIKRQSEHSILAGDPFELECPVKYCANRPHVTWCKLNGTTCVKLEDRQTSWKEEKNISFFILHFEPVLPNDNGSYRCSANFQSNLIESHSTTLYVTDVKSASERPSKDEMAS

SEQ ID NO: 518 - protein, 378 aa, Artificial Sequence
  Description of Artificial Sequence: Synthetic polypeptide
EIVLTQSPATLSLSPGERATLSCSASSSVSYMHWYQQKPGQAPRLLIYDTSKLASGIPARFSGSGSGTDYTLTISSLEPEDFAVYYCFQGSGYPYTFGQGTKLEIKRTVAAPSVFIFPPSDEQLKSGTASVVCLLNNFYPREAKVQWKVDNALQSGNSQESVTEQDSKDSTYSLSSTLTLSKADYEKHKVYACEVTHQGLSSPVTKSFNRGECGGGGSGGGGSGGGGSPGWFLDSPDRPWNPPTFSPALLVVTEGDNATFTCSFSNTSESFVLNWYRMSPSNQTDKLAAFPEDRSQPGQDCRFRVTQLPNGRDFHMSVVRARRNDSGTYLCGAISLAPKAQIKESLRAELRVTERRAEVPTAHPSPSPRPAGQFQTLV

SEQ ID NO: 519 - protein, 758 aa, Artificial Sequence
  Description of Artificial Sequence: Synthetic polypeptide
EIVLTQSPATLSLSPGERATLSCSASSSVSYMHWYQQKPGQAPRLLIYDTSKLASGIPARFSGSGSGTDYTLTISSLEPEDFAVYYCFQGSGYPYTFGQGTKLEIKRTVAAPSVFIFPPSDEQLKSGTASVVCLLNNFYPREAKVQWKVDNALQSGNSQESVTEQDSKDSTYSLSSTLTLSKADYEKHKVYACEVTHQGLSSPVTKSFNRGECGGGGSGGGGSGGGGSMDGRFWIRVQESVMVPEGLCISVPCSFSYPRQDWTGSTPAYGYWFKAVTETTKGAPVATNHQSREVEMSTRGRFQLTGDPAKGNCSLVIRDAQMQDESQYFFRVERGSYVRYNFMNDGFFLKVTALTQKPDVYIPETLEPGQPVTVICVFNWAFEECPPPSFSWTGAALSSQGTKPTTSHFSVLSFTPRPQDHNTDLTCHVDFSRKGVSAQRTVRLRVAYAPRDLVISISRDNTPALEPQPQGNVPYLEAQKGQFLRLLCAADSQPPATLSWVLQNRVLSSSHPWGPRPLGLELPGVKAGDSGRYTCRAENRLGSQQRALDLSVQYPPENLRVMVSQANRTVLENLGNGTSLPVLEGQSLCLVCVTHSSPPARLSWTQRGQVLSPSQPSDPGVLELPRVQVEHEGEFTCHARHPLGSQHVSLSLSVHYSPKLLGPSCSWEAEGLHCSCSSQASPAPSLRWWLGEELLEGNSSQDSFEVTPSSAGPWANSSLSLHGGLSSGLRLRCEAWNVHGAQSGSILQLPDKKGLIST

SEQ ID NO: 520 - protein, 347 aa, Artificial Sequence
  Description of Artificial Sequence: Synthetic polypeptide
EIVLTQSPATLSLSPGERATLSCSASSSVSYMHWYQQKPGQAPRLLIYDTSKLASGIPARFSGSGSGTDYTLTISSLEPEDFAVYYCFQGSGYPYTFGQGTKLEIKRTVAAPSVFIFPPSDEQLKSGTASVVCLLNNFYPREAKVQWKVDNALQSGNSQESVTEQDSKDSTYSLSSTLTLSKADYEKHKVYACEVTHQGLSSPVTKSFNRGECGGGGSGGGGSGGGGSEEELQVIQPDKSVLVAAGETATLRCTATSLIPVGPIQWFRGAGPGRELIYNQKEGHFPRVTTVSDLTKRNNMDFSIRIGNITPADAGTYYCVKFRKGSPDDVEFKSGAGTELSVRAKPS

SEQ ID NO: 521 - protein, 409 aa, Artificial Sequence
  Description of Artificial Sequence: Synthetic polypeptide
EIVLTQSPATLSLSPGERATLSCSASSSVSYMHWYQQKPGQAPRLLIYDTSKLASGIPARFSGSGSGTDYTLTISSLEPEDFAVYYCFQGSGYPYTFGQGTKLEIKRTVAAPSVFIFPPSDEQLKSGTASVVCLLNNFYPREAKVQWKVDNALQSGNSQESVTEQDSKDSTYSLSSTLTLSKADYEKHKVYACEVTHQGLSSPVTKSFNRGECGGGGSGGGGSGGGGSSEVEYRAEVGQNAYLPCFYTPAAPGNLVPVCWGKGACPVFECGNVVLRTDERDVNYWTSRYWLNGDFRKGDVSLTIENVTLADSGIYCCRIQIPGIMNDEKFNLKLVIKPAKVTPAPTRQRDFTAAFPRMLTTRGHGPAETQTLGSLPDINLTQISTLANELRDSRLANDLRDSGATIRIG

SEQ ID NO: 522 - protein, 616 aa, Artificial Sequence
  Description of Artificial Sequence: Synthetic polypeptide
QVQLVQSGAEVKKPGSSVKVSCKASGYTFTDYAMHWVRQAPGQGLEWMGLISIYSDHTNYNQKFQGRVTITADKSTSTAYMELSSLRSEDTAVYYCGRNNYGNYGWYFDVWGQGTTVTVSSASTKGPSVFPLAPSSKSTSGGTAALGCLVKDYFPEPVTVSWNSGALTSGVHTFPAVLQSSGLYSLSSVVTVPSSSLGTQTYICNVNHKPSNTKVDKKVEPKSCDKTHTCPPCPAPEAAGGPSVFLFPPKPKDTLMISRTPEVTCVVVDVSHEDPEVKFNWYVDGVEVHNAKTKPREEQYNSTYRVVSVLTVLHQDWLNGKEYKCKVSNKALPAPIEKTISKAKGQPREPQVYTLPPSREEMTKNQVSLTCLVKGFYPSDIAVEWESNGQPENNYKTTPPVLDSDGSFFLYSKLTVDKSRWQQGNVFSCSVMHEALHNHYTQKSLSLSPGKGGGGSGGGGSGGGGSPGWFLDSPDRPWNPPTFSPALLVVTEGDNATFTCSFSNTSESFVLNWYRMSPSNQTDKLAAFPEDRSQPGQDCRFRVTQLPNGRDFHMSVVRARRNDSGTYLCGAISLAPKAQIKESLRAELRVTERRAEVPTAHPSPSPRPAGQFQTLV

SEQ ID NO: 523 - protein, 348 aa, Artificial Sequence
  Description of Artificial Sequence: Synthetic polypeptide
EIVLTQSPATLSLSPGERATLSCSASSSVSYMHWYQQKPGQAPRLLIYDTSKLASGIPARFSGSGSGTDYTLTISSLEPEDFAVYYCFQGSGYPYTFGQGTKLEIKRTVAAPSVFIFPPSDEQLKSGTASVVCLLNNFYPREAKVQWKVDNALQSGNSQESVTEQDSKDSTYSLSSTLTLSKADYEKHKVYACEVTHQGLSSPVTKSFNRGECGGGGSGGGGSGGGGSKESCDVQLYIKRQSEHSILAGDPFELECPVKYCANRPHVTWCKLNGTTCVKLEDRQTSWKEEKNISFFILHFEPVLPNDNGSYRCSANFQSNLIESHSTTLYVTDVKSASERPSKDEMAS

SEQ ID NO: 524 - protein, 996 aa, Artificial Sequence
  Description of Artificial Sequence: Synthetic polypeptide
QVQLVQSGAEVKKPGSSVKVSCKASGYTFTDYAMHWVRQAPGQGLEWMGLISIYSDHTNYNQKFQGRVTITADKSTSTAYMELSSLRSEDTAVYYCGRNNYGNYGWYFDVWGQGTTVTVSSASTKGPSVFPLAPSSKSTSGGTAALGCLVKDYFPEPVTVSWNSGALTSGVHTFPAVLQSSGLYSLSSVVTVPSSSLGTQTYICNVNHKPSNTKVDKKVEPKSCDKTHTCPPCPAPEAAGGPSVFLFPPKPKDTLMISRTPEVTCVVVDVSHEDPEVKFNWYVDGVEVHNAKTKPREEQYNSTYRVVSVLTVLHQDWLNGKEYKCKVSNKALPAPIEKTISKAKGQPREPQVYTLPPSREEMTKNQVSLTCLVKGFYPSDIAVEWESNGQPENNYKTTPPVLDSDGSFFLYSKLTVDKSRWQQGNVFSCSVMHEALHNHYTQKSLSLSPGKGGGGSGGGGSGGGGSMDGRFWIRVQESVMVPEGLCISVPCSFSYPRQDWTGSTPAYGYWFKAVTETTKGAPVATNHQSREVEMSTRGRFQLTGDPAKGNCSLVIRDAQMQDESQYFFRVERGSYVRYNFMNDGFFLKVTALTQKPDVYIPETLEPGQPVTVICVFNWAFEECPPPSFSWTGAALSSQGTKPTTSHFSVLSFTPRPQDHNTDLTCHVDFSRKGVSAQRTVRLRVAYAPRDLVISISRDNTPALEPQPQGNVPYLEAQKGQFLRLLCAADSQPPATLSWVLQNRVLSSSHPWGPRPLGLELPGVKAGDSGRYTCRAENRLGSQQRALDLSVQYPPENLRVMVSQANRTVLENLGNGTSLPVLEGQSLCLVCVTHSSPPARLSWTQRGQVLSPSQPSDPGVLELPRVQVEHEGEFTCHARHPLGSQHVSLSLSVHYSPKLLGPSCSWEAEGLHCSCSSQASPAPSLRWWLGEELLEGNSSQDSFEVTPSSAGPWANSSLSLHGGLSSGLRLRCEAWNVHGAQSGSILQLPDKKGLIST

SEQ ID NO: 525 - protein, 585 aa, Artificial Sequence
  Description of Artificial Sequence: Synthetic polypeptide
QVQLVQSGAEVKKPGSSVKVSCKASGYTFTDYAMHWVRQAPGQGLEWMGLISIYSDHTNYNQKFQGRVTITADKSTSTAYMELSSLRSEDTAVYYCGRNNYGNYGWYFDVWGQGTTVTVSSASTKGPSVFPLAPSSKSTSGGTAALGCLVKDYFPEPVTVSWNSGALTSGVHTFPAVLQSSGLYSLSSVVTVPSSSLGTQTYICNVNHKPSNTKVDKKVEPKSCDKTHTCPPCPAPEAAGGPSVFLFPPKPKDTLMISRTPEVTCVVVDVSHEDPEVKFNWYVDGVEVHNAKTKPREEQYNSTYRVVSVLTVLHQDWLNGKEYKCKVSNKALPAPIEKTISKAKGQPREPQVYTLPPSREEMTKNQVSLTCLVKGFYPSDIAVEWESNGQPENNYKTTPPVLDSDGSFFLYSKLTVDKSRWQQGNVFSCSVMHEALHNHYTQKSLSLSPGKGGGGSGGGGSGGGGSEEELQVIQPDKSVLVAAGETATLRCTATSLIPVGPIQWFRGAGPGRELIYNQKEGHFPRVTTVSDLTKRNNMDFSIRIGNITPADAGTYYCVKFRKGSPDDVEFKSGAGTELSVRAKPS

SEQ ID NO: 526 - protein, 603 aa, Artificial Sequence
  Description of Artificial Sequence: Synthetic polypeptide
QVQLVQSGAEVKKPGSSVKVSCKASGYTFTDYAMHWVRQAPGQGLEWMGLISIYSDHTNYNQKFQGRVTITADKSTSTAYMELSSLRSEDTAVYYCGRNNYGNYGWYFDVWGQGTTVTVSSASTKGPSVFPLAPSSKSTSGGTAALGCLVKDYFPEPVTVSWNSGALTSGVHTFPAVLQSSGLYSLSSVVTVPSSSLGTQTYICNVNHKPSNTKVDKKVEPKSCDKTHTCPPCPAPEAAGGPSVFLFPPKPKDTLMISRTPEVTCVVVDVSHEDPEVKFNWYVDGVEVHNAKTKPREEQYNSTYRVVSVLTVLHQDWLNGKEYKCKVSNKALPAPIEKTISKAKGQPREPQVYTLPPSREEMTKNQVSLTCLVKGFYPSDIAVEWESNGQPENNYKTTPPVLDSDGSFFLYSKLTVDKSRWQQGNVFSCSVMHEALHNHYTQKSLSLSPGKGGGGSGGGGSGGGGSTIPPHVQKSVNNDMIVTDNNGAVKFPQLCKFCDVRFSTCDNQKSCMSNCSITSICEKPQEVCVAVWRKNDENITLETVCHDPKLPYHDFILEDAASPKCIMKEKKKPGETFFMCSCSSDECNDNIIFSEEYNTSNPD

SEQ ID NO: 527 - protein, 647 aa, Artificial Sequence
  Description of Artificial Sequence: Synthetic polypeptide
QVQLVQSGAEVKKPGSSVKVSCKASGYTFTDYAMHWVRQAPGQGLEWMGLISIYSDHTNYNQKFQGRVTITADKSTSTAYMELSSLRSEDTAVYYCGRNNYGNYGWYFDVWGQGTTVTVSSASTKGPSVFPLAPSSKSTSGGTAALGCLVKDYFPEPVTVSWNSGALTSGVHTFPAVLQSSGLYSLSSVVTVPSSSLGTQTYICNVNHKPSNTKVDKKVEPKSCDKTHTCPPCPAPEAAGGPSVFLFPPKPKDTLMISRTPEVTCVVVDVSHEDPEVKFNWYVDGVEVHNAKTKPREEQYNSTYRVVSVLTVLHQDWLNGKEYKCKVSNKALPAPIEKTISKAKGQPREPQVYTLPPSREEMTKNQVSLTCLVKGFYPSDIAVEWESNGQPENNYKTTPPVLDSDGSFFLYSKLTVDKSRWQQGNVFSCSVMHEALHNHYTQKSLSLSPGKGGGGSGGGGSGGGGSSEVEYRAEVGQNAYLPCFYTPAAPGNLVPVCWGKGACPVFECGNVVLRTDERDVNYWTSRYWLNGDFRKGDVSLTIENVTLADSGIYCCRIQIPGIMNDEKFNLKLVIKPAKVTPAPTRQRDFTAAFPRMLTTRGHGPAETQTLGSLPDINLTQISTLANELRDSRLANDLRDSGATIRIG

SEQ ID NO: 528 - protein, 671 aa, Artificial Sequence
  Description of Artificial Sequence: Synthetic polypeptide
QVQLVQSGAEVKKPGSSVKVSCKASGYTFTDYAMHWVRQAPGQGLEWMGLISIYSDHTNYNQKFQGRVTITADKSTSTAYMELSSLRSEDTAVYYCGRNNYGNYGWYFDVWGQGTTVTVSSASTKGPSVFPLAPSSKSTSGGTAALGCLVKDYFPEPVTVSWNSGALTSGVHTFPAVLQSSGLYSLSSVVTVPSSSLGTQTYICNVNHKPSNTKVDKKVEPKSCDKTHTCPPCPAPEAAGGPSVFLFPPKPKDTLMISRTPEVTCVVVDVSHEDPEVKFNWYVDGVEVHNAKTKPREEQYNSTYRVVSVLTVLHQDWLNGKEYKCKVSNKALPAPIEKTISKAKGQPREPQVYTLPPSREEMTKNQVSLTCLVKGFYPSDIAVEWESNGQPENNYKTTPPVLDSDGSFFLYSKLTVDKSRWQQGNVFSCSVMHEALHNHYTQKSLSLSPGKGGGGSGGGGSGGGGSSDTGRPFVEMYSEIPEIIHMTEGRELVIPCRVTSPNITVTLKKFPLDTLIPDGKRIIWDSRKGFIISNATYKEIGLLTCEATVNGHLYKTNYLTHRQTNTIIDVVLSPSHGIELSVGEKLVLNCTARTELNVGIDFNWEYPSSKHQHKKLVNRDLKTQSGSEMKKFLSTLTIDGVTRSDQGLYTCAASSGLMTKKNSTFVRVHEK

SEQ ID NO: 529 - protein, 615 aa, Artificial Sequence
  Description of Artificial Sequence: Synthetic polypeptide
KESCDVQLYIKRQSEHSILAGDPFELECPVKYCANRPHVTWCKLNGTTCVKLEDRQTSWKEEKNISFFILHFEPVLPNDNGSYRCSANFQSNLIESHSTTLYVTDVKSASERPSKDEMASASTKGPSVFPLAPSSKSTSGGTAALGCLVKDYFPEPVTVSWNSGALTSGVHTFPAVLQSSGLYSLSSVVTVPSSSLGTQTYICNVNHKPSNTKVDKKVEPKSCDKTHTCPPCPAPELLGGPSVFLFPPKPKDTLMISRTPEVTCVVVDVSHEDPEVKFNWYVDGVEVHNAKTKPREEQYNSTYRVVSVLTVLHQDWLNGKEYKCKVSNKALPAPIEKTISKAKGQPREPQVYTLPPSREEMTKNQVSLTCLVKGFYPSDIAVEWESNGQPENNYKTTPPVLDSDGSFFLYSKLTVDKSRWQQGNVFSCSVMHEALHNHYTQKSLSLSPGKGGGGSGGGGSGGGGSPGWFLDSPDRPWNPPTFSPALLVVTEGDNATFTCSFSNTSESFVLNWYRMSPSNQTDKLAAFPEDRSQPGQDCRFRVTQLPNGRDFHMSVVRARRNDSGTYLCGAISLAPKAQIKESLRAELRVTERRAEVPTAHPSPSPRPAGQFQTLV

SEQ ID NO: 530 - protein, 995 aa, Artificial Sequence
  Description of Artificial Sequence: Synthetic polypeptide
KESCDVQLYIKRQSEHSILAGDPFELECPVKYCANRPHVTWCKLNGTTCVKLEDRQTSWKEEKNISFFILHFEPVLPNDNGSYRCSANFQSNLIESHSTTLYVTDVKSASERPSKDEMASASTKGPSVFPLAPSSKSTSGGTAALGCLVKDYFPEPVTVSWNSGALTSGVHTFPAVLQSSGLYSLSSVVTVPSSSLGTQTYICNVNHKPSNTKVDKKVEPKSCDKTHTCPPCPAPELLGGPSVFLFPPKPKDTLMISRTPEVTCVVVDVSHEDPEVKFNWYVDGVEVHNAKTKPREEQYNSTYRVVSVLTVLHQDWLNGKEYKCKVSNKALPAPIEKTISKAKGQPREPQVYTLPPSREEMTKNQVSLTCLVKGFYPSDIAVEWESNGQPENNYKTTPPVLDSDGSFFLYSKLTVDKSRWQQGNVFSCSVMHEALHNHYTQKSLSLSPGKGGGGSGGGGSGGGGSMDGRFWIRVQESVMVPEGLCISVPCSFSYPRQDWTGSTPAYGYWFKAVTETTKGAPVATNHQSREVEMSTRGRFQLTGDPAKGNCSLVIRDAQMQDESQYFFRVERGSYVRYNFMNDGFFLKVTALTQKPDVYIPETLEPGQPVTVICVFNWAFEECPPPSFSWTGAALSSQGTKPTTSHFSVLSFTPRPQDHNTDLTCHVDFSRKGVSAQRTVRLRVAYAPRDLVISISRDNTPALEPQPQGNVPYLEAQKGQFLRLLCAADSQPPATLSWVLQNRVLSSSHPWGPRPLGLELPGVKAGDSGRYTCRAENRLGSQQRALDLSVQYPPENLRVMVSQANRTVLENLGNGTSLPVLEGQSLCLVCVTHSSPPARLSWTQRGQVLSPSQPSDPGVLELPRVQVEHEGEFTCHARHPLGSQHVSLSLSVHYSPKLLGPSCSWEAEGLHCSCSSQASPAPSLRWWLGEELLEGNSSQDSFEVTPSSAGPWANSSLSLHGGLSSGLRLRCEAWNVHGAQSGSILQLPDKKGLIST

SEQ ID NO: 531 - protein, 584 aa, Artificial Sequence
  Description of Artificial Sequence: Synthetic polypeptide
KESCDVQLYIKRQSEHSILAGDPFELECPVKYCANRPHVTWCKLNGTTCVKLEDRQTSWKEEKNISFFILHFEPVLPNDNGSYRCSANFQSNLIESHSTTLYVTDVKSASERPSKDEMASASTKGPSVFPLAPSSKSTSGGTAALGCLVKDYFPEPVTVSWNSGALTSGVHTFPAVLQSSGLYSLSSVVTVPSSSLGTQTYICNVNHKPSNTKVDKKVEPKSCDKTHTCPPCPAPELLGGPSVFLFPPKPKDTLMISRTPEVTCVVVDVSHEDPEVKFNWYVDGVEVHNAKTKPREEQYNSTYRVVSVLTVLHQDWLNGKEYKCKVSNKALPAPIEKTISKAKGQPREPQVYTLPPSREEMTKNQVSLTCLVKGFYPSDIAVEWESNGQPENNYKTTPPVLDSDGSFFLYSKLTVDKSRWQQGNVFSCSVMHEALHNHYTQKSLSLSPGKGGGGSGGGGSGGGGSEEELQVIQPDKSVLVAAGETATLRCTATSLIPVGPIQWFRGAGPGRELIYNQKEGHFPRVTTVSDLTKRNNMDFSIRIGNITPADAGTYYCVKFRKGSPDDVEFKSGAGTELSVRAKPS

SEQ ID NO: 532 - protein, 602 aa, Artificial Sequence
  Description of Artificial Sequence: Synthetic polypeptide
KESCDVQLYIKRQSEHSILAGDPFELECPVKYCANRPHVTWCKLNGTTCVKLEDRQTSWKEEKNISFFILHFEPVLPNDNGSYRCSANFQSNLIESHSTTLYVTDVKSASERPSKDEMASASTKGPSVFPLAPSSKSTSGGTAALGCLVKDYFPEPVTVSWNSGALTSGVHTFPAVLQSSGLYSLSSVVTVPSSSLGTQTYICNVNHKPSNTKVDKKVEPKSCDKTHTCPPCPAPELLGGPSVFLFPPKPKDTLMISRTPEVTCVVVDVSHEDPEVKFNWYVDGVEVHNAKTKPREEQYNSTYRVVSVLTVLHQDWLNGKEYKCKVSNKALPAPIEKTISKAKGQPREPQVYTLPPSREEMTKNQVSLTCLVKGFYPSDIAVEWESNGQPENNYKTTPPVLDSDGSFFLYSKLTVDKSRWQQGNVFSCSVMHEALHNHYTQKSLSLSPGKGGGGSGGGGSGGGGSTIPPHVQKSVNNDMIVTDNNGAVKFPQLCKFCDVRFSTCDNQKSCMSNCSITSICEKPQEVCVAVWRKNDENITLETVCHDPKLPYHDFILEDAASPKCIMKEKKKPGETFFMCSCSSDECNDNIIFSEEYNTSNPD

SEQ ID NO: 533 - protein, 646 aa, Artificial Sequence
  Description of Artificial Sequence: Synthetic polypeptide
KESCDVQLYIKRQSEHSILAGDPFELECPVKYCANRPHVTWCKLNGTTCVKLEDRQTSWKEEKNISFFILHFEPVLPNDNGSYRCSANFQSNLIESHSTTLYVTDVKSASERPSKDEMASASTKGPSVFPLAPSSKSTSGGTAALGCLVKDYFPEPVTVSWNSGALTSGVHTFPAVLQSSGLYSLSSVVTVPSSSLGTQTYICNVNHKPSNTKVDKKVEPKSCDKTHTCPPCPAPELLGGPSVFLFPPKPKDTLMISRTPEVTCVVVDVSHEDPEVKFNWYVDGVEVHNAKTKPREEQYNSTYRVVSVLTVLHQDWLNGKEYKCKVSNKALPAPIEKTISKAKGQPREPQVYTLPPSREEMTKNQVSLTCLVKGFYPSDIAVEWESNGQPENNYKTTPPVLDSDGSFFLYSKLTVDKSRWQQGNVFSCSVMHEALHNHYTQKSLSLSPGKGGGGSGGGGSGGGGSSEVEYRAEVGQNAYLPCFYTPAAPGNLVPVCWGKGACPVFECGNVVLRTDERDVNYWTSRYWLNGDFRKGDVSLTIENVTLADSGIYCCRIQIPGIMNDEKFNLKLVIKPAKVTPAPTRQRDFTAAFPRMLTTRGHGPAETQTLGSLPDINLTQISTLANELRDSRLANDLRDSGATIRIG

SEQ ID NO: 534 - protein, 670 aa, Artificial Sequence
  Description of Artificial Sequence: Synthetic polypeptide
KESCDVQLYIKRQSEHSILAGDPFELECPVKYCANRPHVTWCKLNGTTCVKLEDRQTSWKEEKNISFFILHFEPVLPNDNGSYRCSANFQSNLIESHSTTLYVTDVKSASERPSKDEMASASTKGPSVFPLAPSSKSTSGGTAALGCLVKDYFPEPVTVSWNSGALTSGVHTFPAVLQSSGLYSLSSVVTVPSSSLGTQTYICNVNHKPSNTKVDKKVEPKSCDKTHTCPPCPAPELLGGPSVFLFPPKPKDTLMISRTPEVTCVVVDVSHEDPEVKFNWYVDGVEVHNAKTKPREEQYNSTYRVVSVLTVLHQDWLNGKEYKCKVSNKALPAPIEKTISKAKGQPREPQVYTLPPSREEMTKNQVSLTCLVKGFYPSDIAVEWESNGQPENNYKTTPPVLDSDGSFFLYSKLTVDKSRWQQGNVFSCSVMHEALHNHYTQKSLSLSPGKGGGGSGGGGSGGGGSSDTGRPFVEMYSEIPEIIHMTEGRELVIPCRVTSPNITVTLKKFPLDTLIPDGKRIIWDSRKGFIISNATYKEIGLLTCEATVNGHLYKTNYLTHRQTNTIIDVVLSPSHGIELSVGEKLVLNCTARTELNVGIDFNWEYPSSKHQHKKLVNRDLKTQSGSEMKKFLSTLTIDGVTRSDQGLYTCAASSGLMTKKNSTFVRVHEK

SEQ ID NO: 535 - protein, 615 aa, Artificial Sequence
  Description of Artificial Sequence: Synthetic polypeptide
PGWFLDSPDRPWNPPTFSPALLVVTEGDNATFTCSFSNTSESFVLNWYRMSPSNQTDKLAAFPEDRSQPGQDCRFRVTQLPNGRDFHMSVVRARRNDSGTYLCGAISLAPKAQIKESLRAELRVTERRAEVPTAHPSPSPRPAGQFQTLVASTKGPSVFPLAPSSKSTSGGTAALGCLVKDYFPEPVTVSWNSGALTSGVHTFPAVLQSSGLYSLSSVVTVPSSSLGTQTYICNVNHKPSNTKVDKKVEPKSCDKTHTCPPCPAPELLGGPSVFLFPPKPKDTLMISRTPEVTCVVVDVSHEDPEVKFNWYVDGVEVHNAKTKPREEQYNSTYRVVSVLTVLHQDWLNGKEYKCKVSNKALPAPIEKTISKAKGQPREPQVYTLPPSREEMTKNQVSLTCLVKGFYPSDIAVEWESNGQPENNYKTTPPVLDSDGSFFLYSKLTVDKSRWQQGNVFSCSVMHEALHNHYTQKSLSLSPGKGGGGSGGGGSGGGGSKESCDVQLYIKRQSEHSILAGDPFELECPVKYCANRPHVTWCKLNGTTCVKLEDRQTSWKEEKNISFFILHFEPVLPNDNGSYRCSANFQSNLIESHSTTLYVTDVKSASERPSKDEMAS

SEQ ID NO: 536 - protein, 1025 aa, Artificial Sequence
  Description of Artificial Sequence: Synthetic polypeptide
PGWFLDSPDRPWNPPTFSPALLVVTEGDNATFTCSFSNTSESFVLNWYRMSPSNQTDKLAAFPEDRSQPGQDCRFRVTQLPNGRDFHMSVVRARRNDSGTYLCGAISLAPKAQIKESLRAELRVTERRAEVPTAHPSPSPRPAGQFQTLVASTKGPSVFPLAPSSKSTSGGTAALGCLVKDYFPEPVTVSWNSGALTSGVHTFPAVLQSSGLYSLSSVVTVPSSSLGTQTYICNVNHKPSNTKVDKKVEPKSCDKTHTCPPCPAPELLGGPSVFLFPPKPKDTLMISRTPEVTCVVVDVSHEDPEVKFNWYVDGVEVHNAKTKPREEQYNSTYRVVSVLTVLHQDWLNGKEYKCKVSNKALPAPIEKTISKAKGQPREPQVYTLPPSREEMTKNQVSLTCLVKGFYPSDIAVEWESNGQPENNYKTTPPVLDSDGSFFLYSKLTVDKSRWQQGNVFSCSVMHEALHNHYTQKSLSLSPGKGGGGSGGGGSGGGGSMDGRFWIRVQESVMVPEGLCISVPCSFSYPRQDWTGSTPAYGYWFKAVTETTKGAPVATNHQSREVEMSTRGRFQLTGDPAKGNCSLVIRDAQMQDESQYFFRVERGSYVRYNFMNDGFFLKVTALTQKPDVYIPETLEPGQPVTVICVFNWAFEECPPPSFSWTGAALSSQGTKPTTSHFSVLSFTPRPQDHNTDLTCHVDFSRKGVSAQRTVRLRVAYAPRDLVISISRDNTPALEPQPQGNVPYLEAQKGQFLRLLCAADSQPPATLSWVLQNRVLSSSHPWGPRPLGLELPGVKAGDSGRYTCRAENRLGSQQRALDLSVQYPPENLRVMVSQANRTVLENLGNGTSLPVLEGQSLCLVCVTHSSPPARLSWTQRGQVLSPSQPSDPGVLELPRVQVEHEGEFTCHARHPLGSQHVSLSLSVHYSPKLLGPSCSWEAEGLHCSCSSQASPAPSLRWWLGEELLEGNSSQDSFEVTPSSAGPWANSSLSLHGGLSSGLRLRCEAWNVHGAQSGSILQLPDKKGLIST

SEQ ID NO: 537 - protein, 614 aa, Artificial Sequence
  Description of Artificial Sequence: Synthetic polypeptide
PGWFLDSPDRPWNPPTFSPALLVVTEGDNATFTCSFSNTSESFVLNWYRMSPSNQTDKLAAFPEDRSQPGQDCRFRVTQLPNGRDFHMSVVRARRNDSGTYLCGAISLAPKAQIKESLRAELRVTERRAEVPTAHPSPSPRPAGQFQTLVASTKGPSVFPLAPSSKSTSGGTAALGCLVKDYFPEPVTVSWNSGALTSGVHTFPAVLQSSGLYSLSSVVTVPSSSLGTQTYICNVNHKPSNTKVDKKVEPKSCDKTHTCPPCPAPELLGGPSVFLFPPKPKDTLMISRTPEVTCVVVDVSHEDPEVKFNWYVDGVEVHNAKTKPREEQYNSTYRVVSVLTVLHQDWLNGKEYKCKVSNKALPAPIEKTISKAKGQPREPQVYTLPPSREEMTKNQVSLTCLVKGFYPSDIAVEWESNGQPENNYKTTPPVLDSDGSFFLYSKLTVDKSRWQQGNVFSCSVMHEALHNHYTQKSLSLSPGKGGGGSGGGGSGGGGSEEELQVIQPDKSVLVAAGETATLRCTATSLIPVGPIQWFRGAGPGRELIYNQKEGHFPRVTTVSDLTKRNNMDFSIRIGNITPADAGTYYCVKFRKGSPDDVEFKSGAGTELSVRAKPS

SEQ ID NO: 538 - protein, 632 aa, Artificial Sequence
  Description of Artificial Sequence: Synthetic polypeptide
PGWFLDSPDRPWNPPTFSPALLVVTEGDNATFTCSFSNTSESFVLNWYRMSPSNQTDKLAAFPEDRSQPGQDCRFRVTQLPNGRDFHMSVVRARRNDSGTYLCGAISLAPKAQIKESLRAELRVTERRAEVPTAHPSPSPRPAGQFQTLVASTKGPSVFPLAPSSKSTSGGTAALGCLVKDYFPEPVTVSWNSGALTSGVHTFPAVLQSSGLYSLSSVVTVPSSSLGTQTYICNVNHKPSNTKVDKKVEPKSCDKTHTCPPCPAPELLGGPSVFLFPPKPKDTLMISRTPEVTCVVVDVSHEDPEVKFNWYVDGVEVHNAKTKPREEQYNSTYRVVSVLTVLHQDWLNGKEYKCKVSNKALPAPIEKTISKAKGQPREPQVYTLPPSREEMTKNQVSLTCLVKGFYPSDIAVEWESNGQPENNYKTTPPVLDSDGSFFLYSKLTVDKSRWQQGNVFSCSVMHEALHNHYTQKSLSLSPGKGGGGSGGGGSGGGGSTIPPHVQKSVNNDMIVTDNNGAVKFPQLCKFCDVRFSTCDNQKSCMSNCSITSICEKPQEVCVAVWRKNDENITLETVCHDPKLPYHDFILEDAASPKCIMKEKKKPGETFFMCSCSSDECNDNIIFSEEYNTSNPD

SEQ ID NO: 539 - protein, 676 aa, Artificial Sequence
  Description of Artificial Sequence: Synthetic polypeptide
PGWFLDSPDRPWNPPTFSPALLVVTEGDNATFTCSFSNTSESFVLNWYRMSPSNQTDKLAAFPEDRSQPGQDCRFRVTQLPNGRDFHMSVVRARRNDSGTYLCGAISLAPKAQIKESLRAELRVTERRAEVPTAHPSPSPRPAGQFQTLVASTKGPSVFPLAPSSKSTSGGTAALGCLVKDYFPEPVTVSWNSGALTSGVHTFPAVLQSSGLYSLSSVVTVPSSSLGTQTYICNVNHKPSNTKVDKKVEPKSCDKTHTCPPCPAPELLGGPSVFLFPPKPKDTLMISRTPEVTCVVVDVSHEDPEVKFNWYVDGVEVHNAKTKPREEQYNSTYRVVSVLTVLHQDWLNGKEYKCKVSNKALPAPIEKTISKAKGQPREPQVYTLPPSREEMTKNQVSLTCLVKGFYPSDIAVEWESNGQPENNYKTTPPVLDSDGSFFLYSKLTVDKSRWQQGNVFSCSVMHEALHNHYTQKSLSLSPGKGGGGSGGGGSGGGGSSEVEYRAEVGQNAYLPCFYTPAAPGNLVPVCWGKGACPVFECGNVVLRTDERDVNYWTSRYWLNGDFRKGDVSLTIENVTLADSGIYCCRIQIPGIMNDEKFNLKLVIKPAKVTPAPTRQRDFTAAFPRMLTTRGHGPAETQTLGSLPDINLTQISTLANELRDSRLANDLRDSGATIRIG

SEQ ID NO: 540 - protein, 700 aa, Artificial Sequence
  Description of Artificial Sequence: Synthetic polypeptide
PGWFLDSPDRPWNPPTFSPALLVVTEGDNATFTCSFSNTSESFVLNWYRMSPSNQTDKLAAFPEDRSQPGQDCRFRVTQLPNGRDFHMSVVRARRNDSGTYLCGAISLAPKAQIKESLRAELRVTERRAEVPTAHPSPSPRPAGQFQTLVASTKGPSVFPLAPSSKSTSGGTAALGCLVKDYFPEPVTVSWNSGALTSGVHTFPAVLQSSGLYSLSSVVTVPSSSLGTQTYICNVNHKPSNTKVDKKVEPKSCDKTHTCPPCPAPELLGGPSVFLFPPKPKDTLMISRTPEVTCVVVDVSHEDPEVKFNWYVDGVEVHNAKTKPREEQYNSTYRVVSVLTVLHQDWLNGKEYKCKVSNKALPAPIEKTISKAKGQPREPQVYTLPPSREEMTKNQVSLTCLVKGFYPSDIAVEWESNGQPENNYKTTPPVLDSDGSFFLYSKLTVDKSRWQQGNVFSCSVMHEALHNHYTQKSLSLSPGKGGGGSGGGGSGGGGSSDTGRPFVEMYSEIPEIIHMTEGRELVIPCRVTSPNITVTLKKFPLDTLIPDGKRIIWDSRKGFIISNATYKEIGLLTCEATVNGHLYKTNYLTHRQTNTIIDVVLSPSHGIELSVGEKLVLNCTARTELNVGIDFNWEYPSSKHQHKKLVNRDLKTQSGSEMKKFLSTLTIDGVTRSDQGLYTCAASSGLMTKKNSTFVRVHEK

SEQ ID NO: 541 - protein, 995 aa, Artificial Sequence
  Description of Artificial Sequence: Synthetic polypeptide
MDGRFWIRVQESVMVPEGLCISVPCSFSYPRQDWTGSTPAYGYWFKAVTETTKGAPVATNHQSREVEMSTRGRFQLTGDPAKGNCSLVIRDAQMQDESQYFFRVERGSYVRYNFMNDGFFLKVTALTQKPDVYIPETLEPGQPVTVICVFNWAFEECPPPSFSWTGAALSSQGTKPTTSHFSVLSFTPRPQDHNTDLTCHVDFSRKGVSAQRTVRLRVAYAPRDLVISISRDNTPALEPQPQGNVPYLEAQKGQFLRLLCAADSQPPATLSWVLQNRVLSSSHPWGPRPLGLELPGVKAGDSGRYTCRAENRLGSQQRALDLSVQYPPENLRVMVSQANRTVLENLGNGTSLPVLEGQSLCLVCVTHSSPPARLSWTQRGQVLSPSQPSDPGVLELPRVQVEHEGEFTCHARHPLGSQHVSLSLSVHYSPKLLGPSCSWEAEGLHCSCSSQASPAPSLRWWLGEELLEGNSSQDSFEVTPSSAGPWANSSLSLHGGLSSGLRLRCEAWNVHGAQSGSILQLPDKKGLISTASTKGPSVFPLAPSSKSTSGGTAALGCLVKDYFPEPVTVSWNSGALTSGVHTFPAVLQSSGLYSLSSVVTVPSSSLGTQTYICNVNHKPSNTKVDKKVEPKSCDKTHTCPPCPAPELLGGPSVFLFPPKPKDTLMISRTPEVTCVVVDVSHEDPEVKFNWYVDGVEVHNAKTKPREEQYNSTYRVVSVLTVLHQDWLNGKEYKCKVSNKALPAPIEKTISKAKGQPREPQVYTLPPSREEMTKNQVSLTCLVKGFYPSDIAVEWESNGQPENNYKTTPPVLDSDGSFFLYSKLTVDKSRWQQGNVFSCSVMHEALHNHYTQKSLSLSPGKGGGGSGGGGSGGGGSKESCDVQLYIKRQSEHSILAGDPFELECPVKYCANRPHVTWCKLNGTTCVKLEDRQTSWKEEKNISFFILHFEPVLPNDNGSYRCSANFQSNLIESHSTTLYVTDVKSASERPSKDEMAS

SEQ ID NO: 542 - protein, 1025 aa, Artificial Sequence
  Description of Artificial Sequence: Synthetic polypeptide
MDGRFWIRVQESVMVPEGLCISVPCSFSYPRQDWTGSTPAYGYWFKAVTETTKGAPVATNHQSREVEMSTRGRFQLTGDPAKGNCSLVIRDAQMQDESQYFFRVERGSYVRYNFMNDGFFLKVTALTQKPDVYIPETLEPGQPVTVICVFNWAFEECPPPSFSWTGAALSSQGTKPTTSHFSVLSFTPRPQDHNTDLTCHVDFSRKGVSAQRTVRLRVAYAPRDLVISISRDNTPALEPQPQGNVPYLEAQKGQFLRLLCAADSQPPATLSWVLQNRVLSSSHPWGPRPLGLELPGVKAGDSGRYTCRAENRLGSQQRALDLSVQYPPENLRVMVSQANRTVLENLGNGTSLPVLEGQSLCLVCVTHSSPPARLSWTQRGQVLSPSQPSDPGVLELPRVQVEHEGEFTCHARHPLGSQHVSLSLSVHYSPKLLGPSCSWEAEGLHCSCSSQASPAPSLRWWLGEELLEGNSSQDSFEVTPSSAGPWANSSLSLHGGLSSGLRLRCEAWNVHGAQSGSILQLPDKKGLISTASTKGPSVFPLAPSSKSTSGGTAALGCLVKDYFPEPVTVSWNSGALTSGVHTFPAVLQSSGLYSLSSVVTVPSSSLGTQTYICNVNHKPSNTKVDKKVEPKSCDKTHTCPPCPAPELLGGPSVFLFPPKPKDTLMISRTPEVTCVVVDVSHEDPEVKFNWYVDGVEVHNAKTKPREEQYNSTYRVVSVLTVLHQDWLNGKEYKCKVSNKALPAPIEKTISKAKGQPREPQVYTLPPSREEMTKNQVSLTCLVKGFYPSDIAVEWESNGQPENNYKTTPPVLDSDGSFFLYSKLTVDKSRWQQGNVFSCSVMHEALHNHYTQKSLSLSPGKGGGGSGGGGSGGGGSPGWFLDSPDRPWNPPTFSPALLVVTEGDNATFTCSFSNTSESFVLNWYRMSPSNQTDKLAAFPEDRSQPGQDCRFRVTQLPNGRDFHMSVVRARRNDSGTYLCGAISLAPKAQIKESLRAELRVTERRAEVPTAHPSPSPRPAGQFQTLV

SEQ ID NO: 543 - protein, 994 aa, Artificial Sequence
  Description of Artificial Sequence: Synthetic polypeptide
MDGRFWIRVQESVMVPEGLCISVPCSFSYPRQDWTGSTPAYGYWFKAVTETTKGAPVATNHQSREVEMSTRGRFQLTGDPAKGNCSLVIRDAQMQDESQYFFRVERGSYVRYNFMNDGFFLKVTALTQKPDVYIPETLEPGQPVTVICVFNWAFEECPPPSFSWTGAALSSQGTKPTTSHFSVLSFTPRPQDHNTDLTCHVDFSRKGVSAQRTVRLRVAYAPRDLVISISRDNTPALEPQPQGNVPYLEAQKGQFLRLLCAADSQPPATLSWVLQNRVLSSSHPWGPRPLGLELPGVKAGDSGRYTCRAENRLGSQQRALDLSVQYPPENLRVMVSQANRTVLENLGNGTSLPVLEGQSLCLVCVTHSSPPARLSWTQRGQVLSPSQPSDPGVLELPRVQVEHEGEFTCHARHPLGSQHVSLSLSVHYSPKLLGPSCSWEAEGLHCSCSSQASPAPSLRWWLGEELLEGNSSQDSFEVTPSSAGPWANSSLSLHGGLSSGLRLRCEAWNVHGAQSGSILQLPDKKGLISTASTKGPSVFPLAPSSKSTSGGTAALGCLVKDYFPEPVTVSWNSGALTSGVHTFPAVLQSSGLYSLSSVVTVPSSSLGTQTYICNVNHKPSNTKVDKKVEPKSCDKTHTCPPCPAPELLGGPSVFLFPPKPKDTLMISRTPEVTCVVVDVSHEDPEVKFNWYVDGVEVHNAKTKPREEQYNSTYRVVSVLTVLHQDWLNGKEYKCKVSNKALPAPIEKTISKAKGQPREPQVYTLPPSREEMTKNQVSLTCLVKGFYPSDIAVEWESNGQPENNYKTTPPVLDSDGSFFLYSKLTVDKSRWQQGNVFSCSVMHEALHNHYTQKSLSLSPGKGGGGSGGGGSGGGGSEEELQVIQPDKSVLVAAGETATLRCTATSLIPVGPIQWFRGAGPGRELIYNQKEGHFPRVTTVSDLTKRNNMDFSIRIGNITPADAGTYYCVKFRKGSPDDVEFKSGAGTELSVRAKPS

SEQ ID NO: 544 - protein, 1012 aa, Artificial Sequence
  Description of Artificial Sequence: Synthetic polypeptide
MDGRFWIRVQESVMVPEGLCISVPCSFSYPRQDWTGSTPAYGYWFKAVTETTKGAPVATNHQSREVEMSTRGRFQLTGDPAKGNCSLVIRDAQMQDESQYFFRVERGSYVRYNFMNDGFFLKVTALTQKPDVYIPETLEPGQPVTVICVFNWAFEECPPPSFSWTGAALSSQGTKPTTSHFSVLSFTPRPQDHNTDLTCHVDFSRKGVSAQRTVRLRVAYAPRDLVISISRDNTPALEPQPQGNVPYLEAQKGQFLRLLCAADSQPPATLSWVLQNRVLSSSHPWGPRPLGLELPGVKAGDSGRYTCRAENRLGSQQRALDLSVQYPPENLRVMVSQANRTVLENLGNGTSLPVLEGQSLCLVCVTHSSPPARLSWTQRGQVLSPSQPSDPGVLELPRVQVEHEGEFTCHARHPLGSQHVSLSLSVHYSPKLLGPSCSWEAEGLHCSCSSQASPAPSLRWWLGEELLEGNSSQDSFEVTPSSAGPWANSSLSLHGGLSSGLRLRCEAWNVHGAQSGSILQLPDKKGLISTASTKGPSVFPLAPSSKSTSGGTAALGCLVKDYFPEPVTVSWNSGALTSGVHTFPAVLQSSGLYSLSSVVTVPSSSLGTQTYICNVNHKPSNTKVDKKVEPKSCDKTHTCPPCPAPELLGGPSVFLFPPKPKDTLMISRTPEVTCVVVDVSHEDPEVKFNWYVDGVEVHNAKTKPREEQYNSTYRVVSVLTVLHQDWLNGKEYKCKVSNKALPAPIEKTISKAKGQPREPQVYTLPPSREEMTKNQVSLTCLVKGFYPSDIAVEWESNGQPENNYKTTPPVLDSDGSFFLYSKLTVDKSRWQQGNVFSCSVMHEALHNHYTQKSLSLSPGKGGGGSGGGGSGGGGSTIPPHVQKSVNNDMIVTDNNGAVKFPQLCKFCDVRFSTCDNQKSCMSNCSITSICEKPQEVCVAVWRKNDENITLETVCHDPKLPYHDFILEDAASPKCIMKEKKKPGETFFMCSCSSDECNDNIIFSEEYNTSNPD

SEQ ID NO: 545 - protein, 1056 aa, Artificial Sequence
  Description of Artificial Sequence: Synthetic polypeptide
MDGRFWIRVQESVMVPEGLCISVPCSFSYPRQDWTGSTPAYGYWFKAVTETTKGAPVATNHQSREVEMSTRGRFQLTGDPAKGNCSLVIRDAQMQDESQYFFRVERGSYVRYNFMNDGFFLKVTALTQKPDVYIPETLEPGQPVTVICVFNWAFEECPPPSFSWTGAALSSQGTKPTTSHFSVLSFTPRPQDHNTDLTCHVDFSRKGVSAQRTVRLRVAYAPRDLVISISRDNTPALEPQPQGNVPYLEAQKGQFLRLLCAADSQPPATLSWVLQNRVLSSSHPWGPRPLGLELPGVKAGDSGRYTCRAENRLGSQQRALDLSVQYPPENLRVMVSQANRTVLENLGNGTSLPVLEGQSLCLVCVTHSSPPARLSWTQRGQVLSPSQPSDPGVLELPRVQVEHEGEFTCHARHPLGSQHVSLSLSVHYSPKLLGPSCSWEAEGLHCSCSSQASPAPSLRWWLGEELLEGNSSQDSFEVTPSSAGPWANSSLSLHGGLSSGLRLRCEAWNVHGAQSGSILQLPDKKGLISTASTKGPSVFPLAPSSKSTSGGTAALGCLVKDYFPEPVTVSWNSGALTSGVHTFPAVLQSSGLYSLSSVVTVPSSSLGTQTYICNVNHKPSNTKVDKKVEPKSCDKTHTCPPCPAPELLGGPSVFLFPPKPKDTLMISRTPEVTCVVVDVSHEDPEVKFNWYVDGVEVHNAKTKPREEQYNSTYRVVSVLTVLHQDWLNGKEYKCKVSNKALPAPIEKTISKAKGQPREPQVYTLPPSREEMTKNQVSLTCLVKGFYPSDIAVEWESNGQPENNYKTTPPVLDSDGSFFLYSKLTVDKSRWQQGNVFSCSVMHEALHNHYTQKSLSLSPGKGGGGSGGGGSGGGGSSEVEYRAEVGQNAYLPCFYTPAAPGNLVPVCWGKGACPVFECGNVVLRTDERDVNYWTSRYWLNGDFRKGDVSLTIENVTLADSGIYCCRIQIPGIMNDEKFNLKLVIKPAKVTPAPTRQRDFTAAFPRMLTTRGHGPAETQTLGSLPDINLTQISTLANELRDSRLANDLRDSGATIRIG

SEQ ID NO: 546 - protein, 1080 aa, Artificial Sequence
  Description of Artificial Sequence: Synthetic polypeptide
MDGRFWIRVQESVMVPEGLCISVPCSFSYPRQDWTGSTPAYGYWFKAVTETTKGAPVATNHQSREVEMSTRGRFQLTGDPAKGNCSLVIRDAQMQDESQYFFRVERGSYVRYNFMNDGFFLKVTALTQKPDVYIPETLEPGQPVTVICVFNWAFEECPPPSFSWTGAALSSQGTKPTTSHFSVLSFTPRPQDHNTDLTCHVDFSRKGVSAQRTVRLRVAYAPRDLVISISRDNTPALEPQPQGNVPYLEAQKGQFLRLLCAADSQPPATLSWVLQNRVLSSSHPWGPRPLGLELPGVKAGDSGRYTCRAENRLGSQQRALDLSVQYPPENLRVMVSQANRTVLENLGNGTSLPVLEGQSLCLVCVTHSSPPARLSWTQRGQVLSPSQPSDPGVLELPRVQVEHEGEFTCHARHPLGSQHVSLSLSVHYSPKLLGPSCSWEAEGLHCSCSSQASPAPSLRWWLGEELLEGNSSQDSFEVTPSSAGPWANSSLSLHGGLSSGLRLRCEAWNVHGAQSGSILQLPDKKGLISTASTKGPSVFPLAPSSKSTSGGTAALGCLVKDYFPEPVTVSWNSGALTSGVHTFPAVLQSSGLYSLSSVVTVPSSSLGTQTYICNVNHKPSNTKVDKKVEPKSCDKTHTCPPCPAPELLGGPSVFLFPPKPKDTLMISRTPEVTCVVVDVSHEDPEVKFNWYVDGVEVHNAKTKPREEQYNSTYRVVSVLTVLHQDWLNGKEYKCKVSNKALPAPIEKTISKAKGQPREPQVYTLPPSREEMTKNQVSLTCLVKGFYPSDIAVEWESNGQPENNYKTTPPVLDSDGSFFLYSKLTVDKSRWQQGNVFSCSVMHEALHNHYTQKSLSLSPGKGGGGSGGGGSGGGGSSDTGRPFVEMYSEIPEIIHMTEGRELVIPCRVTSPNITVTLKKFPLDTLIPDGKRIIWDSRKGFIISNATYKEIGLLTCEATVNGHLYKTNYLTHRQTNTIIDVVLSPSHGIELSVGEKLVLNCTARTELNVGIDFNWEYPSSKHQHKKLVNRDLKTQSGSEMKKFLSTLTIDGVTRSDQGLYTCAASSGLMTKKNSTFVRVHEK

SEQ ID NO: 547 - protein, 584 aa, Artificial Sequence
  Description of Artificial Sequence: Synthetic polypeptide
EEELQVIQPDKSVLVAAGETATLRCTATSLIPVGPIQWFRGAGPGRELIYNQKEGHFPRVTTVSDLTKRNNMDFSIRIGNITPADAGTYYCVKFRKGSPDDVEFKSGAGTELSVRAKPSASTKGPSVFPLAPSSKSTSGGTAALGCLVKDYFPEPVTVSWNSGALTSGVHTFPAVLQSSGLYSLSSVVTVPSSSLGTQTYICNVNHKPSNTKVDKKVEPKSCDKTHTCPPCPAPELLGGPSVFLFPPKPKDTLMISRTPEVTCVVVDVSHEDPEVKFNWYVDGVEVHNAKTKPREEQYNSTYRVVSVLTVLHQDWLNGKEYKCKVSNKALPAPIEKTISKAKGQPREPQVYTLPPSREEMTKNQVSLTCLVKGFYPSDIAVEWESNGQPENNYKTTPPVLDSDGSFFLYSKLTVDKSRWQQGNVFSCSVMHEALHNHYTQKSLSLSPGKGGGGSGGGGSGGGGSKESCDVQLYIKRQSEHSILAGDPFELECPVKYCANRPHVTWCKLNGTTCVKLEDRQTSWKEEKNISFFILHFEPVLPNDNGSYRCSANFQSNLIESHSTTLYVTDVKSASERPSKDEMAS

SEQ ID NO: 548 - protein, 614 aa, Artificial Sequence
  Description of Artificial Sequence: Synthetic polypeptide
EEELQVIQPDKSVLVAAGETATLRCTATSLIPVGPIQWFRGAGPGRELIYNQKEGHFPRVTTVSDLTKRNNMDFSIRIGNITPADAGTYYCVKFRKGSPDDVEFKSGAGTELSVRAKPSASTKGPSVFPLAPSSKSTSGGTAALGCLVKDYFPEPVTVSWNSGALTSGVHTFPAVLQSSGLYSLSSVVTVPSSSLGTQTYICNVNHKPSNTKVDKKVEPKSCDKTHTCPPCPAPELLGGPSVFLFPPKPKDTLMISRTPEVTCVVVDVSHEDPEVKFNWYVDGVEVHNAKTKPREEQYNSTYRVVSVLTVLHQDWLNGKEYKCKVSNKALPAPIEKTISKAKGQPREPQVYTLPPSREEMTKNQVSLTCLVKGFYPSDIAVEWESNGQPENNYKTTPPVLDSDGSFFLYSKLTVDKSRWQQGNVFSCSVMHEALHNHYTQKSLSLSPGKGGGGSGGGGSGGGGSPGWFLDSPDRPWNPPTFSPALLVVTEGDNATFTCSFSNTSESFVLNWYRMSPSNQTDKLAAFPEDRSQPGQDCRFRVTQLPNGRDFHMSVVRARRNDSGTYLCGAISLAPKAQIKESLRAELRVTERRAEVPTAHPSPSPRPAGQFQTLV

SEQ ID NO: 549 - protein, 994 aa, Artificial Sequence
  Description of Artificial Sequence: Synthetic polypeptide
EEELQVIQPDKSVLVAAGETATLRCTATSLIPVGPIQWFRGAGPGRELIYNQKEGHFPRVTTVSDLTKRNNMDFSIRIGNITPADAGTYYCVKFRKGSPDDVEFKSGAGTELSVRAKPSASTKGPSVFPLAPSSKSTSGGTAALGCLVKDYFPEPVTVSWNSGALTSGVHTFPAVLQSSGLYSLSSVVTVPSSSLGTQTYICNVNHKPSNTKVDKKVEPKSCDKTHTCPPCPAPELLGGPSVFLFPPKPKDTLMISRTPEVTCVVVDVSHEDPEVKFNWYVDGVEVHNAKTKPREEQYNSTYRVVSVLTVLHQDWLNGKEYKCKVSNKALPAPIEKTISKAKGQPREPQVYTLPPSREEMTKNQVSLTCLVKGFYPSDIAVEWESNGQPENNYKTTPPVLDSDGSFFLYSKLTVDKSRWQQGNVFSCSVMHEALHNHYTQKSLSLSPGKGGGGSGGGGSGGGGSMDGRFWIRVQESVMVPEGLCISVPCSFSYPRQDWTGSTPAYGYWFKAVTETTKGAPVATNHQSREVEMSTRGRFQLTGDPAKGNCSLVIRDAQMQDESQYFFRVERGSYVRYNFMNDGFFLKVTALTQKPDVYIPETLEPGQPVTVICVFNWAFEECPPPSFSWTGAALSSQGTKPTTSHFSVLSFTPRPQDHNTDLTCHVDFSRKGVSAQRTVRLRVAYAPRDLVISISRDNTPALEPQPQGNVPYLEAQKGQFLRLLCAADSQPPATLSWVLQNRVLSSSHPWGPRPLGLELPGVKAGDSGRYTCRAENRLGSQQRALDLSVQYPPENLRVMVSQANRTVLENLGNGTSLPVLEGQSLCLVCVTHSSPPARLSWTQRGQVLSPSQPSDPGVLELPRVQVEHEGEFTCHARHPLGSQHVSLSLSVHYSPKLLGPSCSWEAEGLHCSCSSQASPAPSLRWWLGEELLEGNSSQDSFEVTPSSAGPWANSSLSLHGGLSSGLRLRCEAWNVHGAQSGSILQLPDKKGLIST

SEQ ID NO: 550 - protein, 601 aa, Artificial Sequence
  Description of Artificial Sequence: Synthetic polypeptide
EEELQVIQPDKSVLVAAGETATLRCTATSLIPVGPIQWFRGAGPGRELIYNQKEGHFPRVTTVSDLTKRNNMDFSIRIGNITPADAGTYYCVKFRKGSPDDVEFKSGAGTELSVRAKPSASTKGPSVFPLAPSSKSTSGGTAALGCLVKDYFPEPVTVSWNSGALTSGVHTFPAVLQSSGLYSLSSVVTVPSSSLGTQTYICNVNHKPSNTKVDKKVEPKSCDKTHTCPPCPAPELLGGPSVFLFPPKPKDTLMISRTPEVTCVVVDVSHEDPEVKFNWYVDGVEVHNAKTKPREEQYNSTYRVVSVLTVLHQDWLNGKEYKCKVSNKALPAPIEKTISKAKGQPREPQVYTLPPSREEMTKNQVSLTCLVKGFYPSDIAVEWESNGQPENNYKTTPPVLDSDGSFFLYSKLTVDKSRWQQGNVFSCSVMHEALHNHYTQKSLSLSPGKGGGGSGGGGSGGGGSTIPPHVQKSVNNDMIVTDNNGAVKFPQLCKFCDVRFSTCDNQKSCMSNCSITSICEKPQEVCVAVWRKNDENITLETVCHDPKLPYHDFILEDAASPKCIMKEKKKPGETFFMCSCSSDECNDNIIFSEEYNTSNPD

SEQ ID NO: 551 - protein, 645 aa, Artificial Sequence
  Description of Artificial Sequence: Synthetic polypeptide
EEELQVIQPDKSVLVAAGETATLRCTATSLIPVGPIQWFRGAGPGRELIYNQKEGHFPRVTTVSDLTKRNNMDFSIRIGNITPADAGTYYCVKFRKGSPDDVEFKSGAGTELSVRAKPSASTKGPSVFPLAPSSKSTSGGTAALGCLVKDYFPEPVTVSWNSGALTSGVHTFPAVLQSSGLYSLSSVVTVPSSSLGTQTYICNVNHKPSNTKVDKKVEPKSCDKTHTCPPCPAPELLGGPSVFLFPPKPKDTLMISRTPEVTCVVVDVSHEDPEVKFNWYVDGVEVHNAKTKPREEQYNSTYRVVSVLTVLHQDWLNGKEYKCKVSNKALPAPIEKTISKAKGQPREPQVYTLPPSREEMTKNQVSLTCLVKGFYPSDIAVEWESNGQPENNYKTTPPVLDSDGSFFLYSKLTVDKSRWQQGNVFSCSVMHEALHNHYTQKSLSLSPGKGGGGSGGGGSGGGGSSEVEYRAEVGQNAYLPCFYTPAAPGNLVPVCWGKGACPVFECGNVVLRTDERDVNYWTSRYWLNGDFRKGDVSLTIENVTLADSGIYCCRIQIPGIMNDEKFNLKLVIKPAKVTPAPTRQRDFTAAFPRMLTTRGHGPAETQTLGSLPDINLTQISTLANELRDSRLANDLRDSGATIRIG

SEQ ID NO: 552 - protein, 669 aa, Artificial Sequence
  Description of Artificial Sequence: Synthetic polypeptide
EEELQVIQPDKSVLVAAGETATLRCTATSLIPVGPIQWFRGAGPGRELIYNQKEGHFPRVTTVSDLTKRNNMDFSIRIGNITPADAGTYYCVKFRKGSPDDVEFKSGAGTELSVRAKPSASTKGPSVFPLAPSSKSTSGGTAALGCLVKDYFPEPVTVSWNSGALTSGVHTFPAVLQSSGLYSLSSVVTVPSSSLGTQTYICNVNHKPSNTKVDKKVEPKSCDKTHTCPPCPAPELLGGPSVFLFPPKPKDTLMISRTPEVTCVVVDVSHEDPEVKFNWYVDGVEVHNAKTKPREEQYNSTYRVVSVLTVLHQDWLNGKEYKCKVSNKALPAPIEKTISKAKGQPREPQVYTLPPSREEMTKNQVSLTCLVKGFYPSDIAVEWESNGQPENNYKTTPPVLDSDGSFFLYSKLTVDKSRWQQGNVFSCSVMHEALHNHYTQKSLSLSPGKGGGGSGGGGSGGGGSSDTGRPFVEMYSEIPEIIHMTEGRELVIPCRVTSPNITVTLKKFPLDTLIPDGKRIIWDSRKGFIISNATYKEIGLLTCEATVNGHLYKTNYLTHRQTNTIIDVVLSPSHGIELSVGEKLVLNCTARTELNVGIDFNWEYPSSKHQHKKLVNRDLKTQSGSEMKKFLSTLTIDGVTRSDQGLYTCAASSGLMTKKNSTFVRVHEK

SEQ ID NO: 553 - protein, 602 aa, Artificial Sequence
  Description of Artificial Sequence: Synthetic polypeptide
TIPPHVQKSVNNDMIVTDNNGAVKFPQLCKFCDVRFSTCDNQKSCMSNCSITSICEKPQEVCVAVWRKNDENITLETVCHDPKLPYHDFILEDAASPKCIMKEKKKPGETFFMCSCSSDECNDNIIFSEEYNTSNPDASTKGPSVFPLAPSSKSTSGGTAALGCLVKDYFPEPVTVSWNSGALTSGVHTFPAVLQSSGLYSLSSVVTVPSSSLGTQTYICNVNHKPSNTKVDKKVEPKSCDKTHTCPPCPAPELLGGPSVFLFPPKPKDTLMISRTPEVTCVVVDVSHEDPEVKFNWYVDGVEVHNAKTKPREEQYNSTYRVVSVLTVLHQDWLNGKEYKCKVSNKALPAPIEKTISKAKGQPREPQVYTLPPSREEMTKNQVSLTCLVKGFYPSDIAVEWESNGQPENNYKTTPPVLDSDGSFFLYSKLTVDKSRWQQGNVFSCSVMHEALHNHYTQKSLSLSPGKGGGGSGGGGSGGGGSKESCDVQLYIKRQSEHSILAGDPFELECPVKYCANRPHVTWCKLNGTTCVKLEDRQTSWKEEKNISFFILHFEPVLPNDNGSYRCSANFQSNLIESHSTTLYVTDVKSASERPSKDEMAS

SEQ ID NO: 554 - protein, 632 aa, Artificial Sequence
  Description of Artificial Sequence: Synthetic polypeptide
TIPPHVQKSVNNDMIVTDNNGAVKFPQLCKFCDVRFSTCDNQKSCMSNCSITSICEKPQEVCVAVWRKNDENITLETVCHDPKLPYHDFILEDAASPKCIMKEKKKPGETFFMCSCSSDECNDNIIFSEEYNTSNPDASTKGPSVFPLAPSSKSTSGGTAALGCLVKDYFPEPVTVSWNSGALTSGVHTFPAVLQSSGLYSLSSVVTVPSSSLGTQTYICNVNHKPSNTKVDKKVEPKSCDKTHTCPPCPAPELLGGPSVFLFPPKPKDTLMISRTPEVTCVVVDVSHEDPEVKFNWYVDGVEVHNAKTKPREEQYNSTYRVVSVLTVLHQDWLNGKEYKCKVSNKALPAPIEKTISKAKGQPREPQVYTLPPSREEMTKNQVSLTCLVKGFYPSDIAVEWESNGQPENNYKTTPPVLDSDGSFFLYSKLTVDKSRWQQGNVFSCSVMHEALHNHYTQKSLSLSPGKGGGGSGGGGSGGGGSPGWFLDSPDRPWNPPTFSPALLVVTEGDNATFTCSFSNTSESFVLNWYRMSPSNQTDKLAAFPEDRSQPGQDCRFRVTQLPNGRDFHMSVVRARRNDSGTYLCGAISLAPKAQIKESLRAELRVTERRAEVPTAHPSPSPRPAGQFQTLV

SEQ ID NO: 555 - protein, 1012 aa, Artificial Sequence
  Description of Artificial Sequence: Synthetic polypeptide
TIPPHVQKSVNNDMIVTDNNGAVKFPQLCKFCDVRFSTCDNQKSCMSNCSITSICEKPQEVCVAVWRKNDENITLETVCHDPKLPYHDFILEDAASPKCIMKEKKKPGETFFMCSCSSDECNDNIIFSEEYNTSNPDASTKGPSVFPLAPSSKSTSGGTAALGCLVKDYFPEPVTVSWNSGALTSGVHTFPAVLQSSGLYSLSSVVTVPSSSLGTQTYICNVNHKPSNTKVDKKVEPKSCDKTHTCPPCPAPELLGGPSVFLFPPKPKDTLMISRTPEVTCVVVDVSHEDPEVKFNWYVDGVEVHNAKTKPREEQYNSTYRVVSVLTVLHQDWLNGKEYKCKVSNKALPAPIEKTISKAKGQPREPQVYTLPPSREEMTKNQVSLTCLVKGFYPSDIAVEWESNGQPENNYKTTPPVLDSDGSFFLYSKLTVDKSRWQQGNVFSCSVMHEALHNHYTQKSLSLSPGKGGGGSGGGGSGGGGSMDGRFWIRVQESVMVPEGLCISVPCSFSYPRQDWTGSTPAYGYWFKAVTETTKGAPVATNHQSREVEMSTRGRFQLTGDPAKGNCSLVIRDAQMQDESQYFFRVERGSYVRYNFMNDGFFLKVTALTQKPDVYIPETLEPGQPVTVICVFNWAFEECPPPSFSWTGAALSSQGTKPTTSHFSVLSFTPRPQDHNTDLTCHVDFSRKGVSAQRTVRLRVAYAPRDLVISISRDNTPALEPQPQGNVPYLEAQKGQFLRLLCAADSQPPATLSWVLQNRVLSSSHPWGPRPLGLELPGVKAGDSGRYTCRAENRLGSQQRALDLSVQYPPENLRVMVSQANRTVLENLGNGTSLPVLEGQSLCLVCVTHSSPPARLSWTQRGQVLSPSQPSDPGVLELPRVQVEHEGEFTCHARHPLGSQHVSLSLSVHYSPKLLGPSCSWEAEGLHCSCSSQASPAPSLRWWLGEELLEGNSSQDSFEVTPSSAGPWANSSLSLHGGLSSGLRLRCEAWNVHGAQSGSILQLPDKKGLIST

SEQ ID NO: 556 - protein, 601 aa, Artificial Sequence
  Description of Artificial Sequence: Synthetic polypeptide
TIPPHVQKSVNNDMIVTDNNGAVKFPQLCKFCDVRFSTCDNQKSCMSNCSITSICEKPQEVCVAVWRKNDENITLETVCHDPKLPYHDFILEDAASPKCIMKEKKKPGETFFMCSCSSDECNDNIIFSEEYNTSNPDASTKGPSVFPLAPSSKSTSGGTAALGCLVKDYFPEPVTVSWNSGALTSGVHTFPAVLQSSGLYSLSSVVTVPSSSLGTQTYICNVNHKPSNTKVDKKVEPKSCDKTHTCPPCPAPELLGGPSVFLFPPKPKDTLMISRTPEVTCVVVDVSHEDPEVKFNWYVDGVEVHNAKTKPREEQYNSTYRVVSVLTVLHQDWLNGKEYKCKVSNKALPAPIEKTISKAKGQPREPQVYTLPPSREEMTKNQVSLTCLVKGFYPSDIAVEWESNGQPENNYKTTPPVLDSDGSFFLYSKLTVDKSRWQQGNVFSCSVMHEALHNHYTQKSLSLSPGKGGGGSGGGGSGGGGSEEELQVIQPDKSVLVAAGETATLRCTATSLIPVGPIQWFRGAGPGRELIYNQKEGHFPRVTTVSDLTKRNNMDFSIRIGNITPADAGTYYCVKFRKGSPDDVEFKSGAGTELSVRAKPS

SEQ ID NO: 557 - protein, 663 aa, Artificial Sequence
  Description of Artificial Sequence: Synthetic polypeptide
TIPPHVQKSVNNDMIVTDNNGAVKFPQLCKFCDVRFSTCDNQKSCMSNCSITSICEKPQEVCVAVWRKNDENITLETVCHDPKLPYHDFILEDAASPKCIMKEKKKPGETFFMCSCSSDECNDNIIFSEEYNTSNPDASTKGPSVFPLAPSSKSTSGGTAALGCLVKDYFPEPVTVSWNSGALTSGVHTFPAVLQSSGLYSLSSVVTVPSSSLGTQTYICNVNHKPSNTKVDKKVEPKSCDKTHTCPPCPAPELLGGPSVFLFPPKPKDTLMISRTPEVTCVVVDVSHEDPEVKFNWYVDGVEVHNAKTKPREEQYNSTYRVVSVLTVLHQDWLNGKEYKCKVSNKALPAPIEKTISKAKGQPREPQVYTLPPSREEMTKNQVSLTCLVKGFYPSDIAVEWESNGQPENNYKTTPPVLDSDGSFFLYSKLTVDKSRWQQGNVFSCSVMHEALHNHYTQKSLSLSPGKGGGGSGGGGSGGGGSSEVEYRAEVGQNAYLPCFYTPAAPGNLVPVCWGKGACPVFECGNVVLRTDERDVNYWTSRYWLNGDFRKGDVSLTIENVTLADSGIYCCRIQIPGIMNDEKFNLKLVIKPAKVTPAPTRQRDFTAAFPRMLTTRGHGPAETQTLGSLPDINLTQISTLANELRDSRLANDLRDSGATIRIG

SEQ ID NO: 558 - protein, 687 aa, Artificial Sequence
  Description of Artificial Sequence: Synthetic polypeptide
TIPPHVQKSVNNDMIVTDNNGAVKFPQLCKFCDVRFSTCDNQKSCMSNCSITSICEKPQEVCVAVWRKNDENITLETVCHDPKLPYHDFILEDAASPKCIMKEKKKPGETFFMCSCSSDECNDNIIFSEEYNTSNPDASTKGPSVFPLAPSSKSTSGGTAALGCLVKDYFPEPVTVSWNSGALTSGVHTFPAVLQSSGLYSLSSVVTVPSSSLGTQTYICNVNHKPSNTKVDKKVEPKSCDKTHTCPPCPAPELLGGPSVFLFPPKPKDTLMISRTPEVTCVVVDVSHEDPEVKFNWYVDGVEVHNAKTKPREEQYNSTYRVVSVLTVLHQDWLNGKEYKCKVSNKALPAPIEKTISKAKGQPREPQVYTLPPSREEMTKNQVSLTCLVKGFYPSDIAVEWESNGQPENNYKTTPPVLDSDGSFFLYSKLTVDKSRWQQGNVFSCSVMHEALHNHYTQKSLSLSPGKGGGGSGGGGSGGGGSSDTGRPFVEMYSEIPEIIHMTEGRELVIPCRVTSPNITVTLKKFPLDTLIPDGKRIIWDSRKGFIISNATYKEIGLLTCEATVNGHLYKTNYLTHRQTNTIIDVVLSPSHGIELSVGEKLVLNCTARTELNVGIDFNWEYPSSKHQHKKLVNRDLKTQSGSEMKKFLSTLTIDGVTRSDQGLYTCAASSGLMTKKNSTFVRVHEK

SEQ ID NO: 559 - protein, 646 aa, Artificial Sequence
  Description of Artificial Sequence: Synthetic polypeptide
SEVEYRAEVGQNAYLPCFYTPAAPGNLVPVCWGKGACPVFECGNVVLRTDERDVNYWTSRYWLNGDFRKGDVSLTIENVTLADSGIYCCRIQIPGIMNDEKFNLKLVIKPAKVTPAPTRQRDFTAAFPRMLTTRGHGPAETQTLGSLPDINLTQISTLANELRDSRLANDLRDSGATIRIGASTKGPSVFPLAPSSKSTSGGTAALGCLVKDYFPEPVTVSWNSGALTSGVHTFPAVLQSSGLYSLSSVVTVPSSSLGTQTYICNVNHKPSNTKVDKKVEPKSCDKTHTCPPCPAPELLGGPSVFLFPPKPKDTLMISRTPEVTCVVVDVSHEDPEVKFNWYVDGVEVHNAKTKPREEQYNSTYRVVSVLTVLHQDWLNGKEYKCKVSNKALPAPIEKTISKAKGQPREPQVYTLPPSREEMTKNQVSLTCLVKGFYPSDIAVEWESNGQPENNYKTTPPVLDSDGSFFLYSKLTVDKSRWQQGNVFSCSVMHEALHNHYTQKSLSLSPGKGGGGSGGGGSGGGGSKESCDVQLYIKRQSEHSILAGDPFELECPVKYCANRPHVTWCKLNGTTCVKLEDRQTSWKEEKNISFFILHFEPVLPNDNGSYRCSANFQSNLIESHSTTLYVTDVKSASERPSKDEMAS

SEQ ID NO: 560 - protein, 676 aa, Artificial Sequence
  Description of Artificial Sequence: Synthetic polypeptide
SEVEYRAEVGQNAYLPCFYTPAAPGNLVPVCWGKGACPVFECGNVVLRTDERDVNYWTSRYWLNGDFRKGDVSLTIENVTLADSGIYCCRIQIPGIMNDEKFNLKLVIKPAKVTPAPTRQRDFTAAFPRMLTTRGHGPAETQTLGSLPDINLTQISTLANELRDSRLANDLRDSGATIRIGASTKGPSVFPLAPSSKSTSGGTAALGCLVKDYFPEPVTVSWNSGALTSGVHTFPAVLQSSGLYSLSSVVTVPSSSLGTQTYICNVNHKPSNTKVDKKVEPKSCDKTHTCPPCPAPELLGGPSVFLFPPKPKDTLMISRTPEVTCVVVDVSHEDPEVKFNWYVDGVEVHNAKTKPREEQYNSTYRVVSVLTVLHQDWLNGKEYKCKVSNKALPAPIEKTISKAKGQPREPQVYTLPPSREEMTKNQVSLTCLVKGFYPSDIAVEWESNGQPENNYKTTPPVLDSDGSFFLYSKLTVDKSRWQQGNVFSCSVMHEALHNHYTQKSLSLSPGKGGGGSGGGGSGGGGSPGWFLDSPDRPWNPPTFSPALLVVTEGDNATFTCSFSNTSESFVLNWYRMSPSNQTDKLAAFPEDRSQPGQDCRFRVTQLPNGRDFHMSVVRARRNDSGTYLCGAISLAPKAQIKESLRAELRVTERRAEVPTAHPSPSPRPAGQFQTLV

SEQ ID NO: 561 - protein, 1056 aa, Artificial Sequence
  Description of Artificial Sequence: Synthetic polypeptide
SEVEYRAEVGQNAYLPCFYTPAAPGNLVPVCWGKGACPVFECGNVVLRTDERDVNYWTSRYWLNGDFRKGDVSLTIENVTLADSGIYCCRIQIPGIMNDEKFNLKLVIKPAKVTPAPTRQRDFTAAFPRMLTTRGHGPAETQTLGSLPDINLTQISTLANELRDSRLANDLRDSGATIRIGASTKGPSVFPLAPSSKSTSGGTAALGCLVKDYFPEPVTVSWNSGALTSGVHTFPAVLQSSGLYSLSSVVTVPSSSLGTQTYICNVNHKPSNTKVDKKVEPKSCDKTHTCPPCPAPELLGGPSVFLFPPKPKDTLMISRTPEVTCVVVDVSHEDPEVKFNWYVDGVEVHNAKTKPREEQYNSTYRVVSVLTVLHQDWLNGKEYKCKVSNKALPAPIEKTISKAKGQPREPQVYTLPPSREEMTKNQVSLTCLVKGFYPSDIAVEWESNGQPENNYKTTPPVLDSDGSFFLYSKLTVDKSRWQQGNVFSCSVMHEALHNHYTQKSLSLSPGKGGGGSGGGGSGGGGSMDGRFWIRVQESVMVPEGLCISVPCSFSYPRQDWTGSTPAYGYWFKAVTETTKGAPVATNHQSREVEMSTRGRFQLTGDPAKGNCSLVIRDAQMQDESQYFFRVERGSYVRYNFMNDGFFLKVTALTQKPDVYIPETLEPGQPVTVICVFNWAFEECPPPSFSWTGAALSSQGTKPTTSHFSVLSFTPRPQDHNTDLTCHVDFSRKGVSAQRTVRLRVAYAPRDLVISISRDNTPALEPQPQGNVPYLEAQKGQFLRLLCAADSQPPATLSWVLQNRVLSSSHPWGPRPLGLELPGVKAGDSGRYTCRAENRLGSQQRALDLSVQYPPENLRVMVSQANRTVLENLGNGTSLPVLEGQSLCLVCVTHSSPPARLSWTQRGQVLSPSQPSDPGVLELPRVQVEHEGEFTCHARHPLGSQHVSLSLSVHYSPKLLGPSCSWEAEGLHCSCSSQASPAPSLRWWLGEELLEGNSSQDSFEVTPSSAGPWANSSLSLHGGLSSGLRLRCEAWNVHGAQSGSILQLPDKKGLIST

SEQ ID NO: 562 - protein, 645 aa, Artificial Sequence
  Description of Artificial Sequence: Synthetic polypeptide
SEVEYRAEVGQNAYLPCFYTPAAPGNLVPVCWGKGACPVFECGNVVLRTDERDVNYWTSRYWLNGDFRKGDVSLTIENVTLADSGIYCCRIQIPGIMNDEKFNLKLVIKPAKVTPAPTRQRDFTAAFPRMLTTRGHGPAETQTLGSLPDINLTQISTLANELRDSRLANDLRDSGATIRIGASTKGPSVFPLAPSSKSTSGGTAALGCLVKDYFPEPVTVSWNSGALTSGVHTFPAVLQSSGLYSLSSVVTVPSSSLGTQTYICNVNHKPSNTKVDKKVEPKSCDKTHTCPPCPAPELLGGPSVFLFPPKPKDTLMISRTPEVTCVVVDVSHEDPEVKFNWYVDGVEVHNAKTKPREEQYNSTYRVVSVLTVLHQDWLNGKEYKCKVSNKALPAPIEKTISKAKGQPREPQVYTLPPSREEMTKNQVSLTCLVKGFYPSDIAVEWESNGQPENNYKTTPPVLDSDGSFFLYSKLTVDKSRWQQGNVFSCSVMHEALHNHYTQKSLSLSPGKGGGGSGGGGSGGGGSEEELQVIQPDKSVLVAAGETATLRCTATSLIPVGPIQWFRGAGPGRELIYNQKEGHFPRVTTVSDLTKRNNMDFSIRIGNITPADAGTYYCVKFRKGSPDDVEFKSGAGTELSVRAKPS

SEQ ID NO: 563 - protein, 663 aa, Artificial Sequence
  Description of Artificial Sequence: Synthetic polypeptide
SEVEYRAEVGQNAYLPCFYTPAAPGNLVPVCWGKGACPVFECGNVVLRTDERDVNYWTSRYWLNGDFRKGDVSLTIENVTLADSGIYCCRIQIPGIMNDEKFNLKLVIKPAKVTPAPTRQRDFTAAFPRMLTTRGHGPAETQTLGSLPDINLTQISTLANELRDSRLANDLRDSGATIRIGASTKGPSVFPLAPSSKSTSGGTAALGCLVKDYFPEPVTVSWNSGALTSGVHTFPAVLQSSGLYSLSSVVTVPSSSLGTQTYICNVNHKPSNTKVDKKVEPKSCDKTHTCPPCPAPELLGGPSVFLFPPKPKDTLMISRTPEVTCVVVDVSHEDPEVKFNWYVDGVEVHNAKTKPREEQYNSTYRVVSVLTVLHQDWLNGKEYKCKVSNKALPAPIEKTISKAKGQPREPQVYTLPPSREEMTKNQVSLTCLVKGFYPSDIAVEWESNGQPENNYKTTPPVLDSDGSFFLYSKLTVDKSRWQQGNVFSCSVMHEALHNHYTQKSLSLSPGKGGGGSGGGGSGGGGSTIPPHVQKSVNNDMIVTDNNGAVKFPQLCKFCDVRFSTCDNQKSCMSNCSITSICEKPQEVCVAVWRKNDENITLETVCHDPKLPYHDFILEDAASPKCIMKEKKKPGETFFMCSCSSDECNDNIIFSEEYNTSNPD

SEQ ID NO: 564 - protein, 731 aa, Artificial Sequence
  Description of Artificial Sequence: Synthetic polypeptide
SEVEYRAEVGQNAYLPCFYTPAAPGNLVPVCWGKGACPVFECGNVVLRTDERDVNYWTSRYWLNGDFRKGDVSLTIENVTLADSGIYCCRIQIPGIMNDEKFNLKLVIKPAKVTPAPTRQRDFTAAFPRMLTTRGHGPAETQTLGSLPDINLTQISTLANELRDSRLANDLRDSGATIRIGASTKGPSVFPLAPSSKSTSGGTAALGCLVKDYFPEPVTVSWNSGALTSGVHTFPAVLQSSGLYSLSSVVTVPSSSLGTQTYICNVNHKPSNTKVDKKVEPKSCDKTHTCPPCPAPELLGGPSVFLFPPKPKDTLMISRTPEVTCVVVDVSHEDPEVKFNWYVDGVEVHNAKTKPREEQYNSTYRVVSVLTVLHQDWLNGKEYKCKVSNKALPAPIEKTISKAKGQPREPQVYTLPPSREEMTKNQVSLTCLVKGFYPSDIAVEWESNGQPENNYKTTPPVLDSDGSFFLYSKLTVDKSRWQQGNVFSCSVMHEALHNHYTQKSLSLSPGKGGGGSGGGGSGGGGSSDTGRPFVEMYSEIPEIIHMTEGRELVIPCRVTSPNITVTLKKFPLDTLIPDGKRIIWDSRKGFIISNATYKEIGLLTCEATVNGHLYKTNYLTHRQTNTIIDVVLSPSHGIELSVGEKLVLNCTARTELNVGIDFNWEYPSSKHQHKKLVNRDLKTQSGSEMKKFLSTLTIDGVTRSDQGLYTCAASSGLMTKKNSTFVRVHEK

SEQ ID NO: 565 - protein, 670 aa, Artificial Sequence
  Description of Artificial Sequence: Synthetic polypeptide
SDTGRPFVEMYSEIPEIIHMTEGRELVIPCRVTSPNITVTLKKFPLDTLIPDGKRIIWDSRKGFIISNATYKEIGLLTCEATVNGHLYKTNYLTHRQTNTIIDVVLSPSHGIELSVGEKLVLNCTARTELNVGIDFNWEYPSSKHQHKKLVNRDLKTQSGSEMKKFLSTLTIDGVTRSDQGLYTCAASSGLMTKKNSTFVRVHEKASTKGPSVFPLAPSSKSTSGGTAALGCLVKDYFPEPVTVSWNSGALTSGVHTFPAVLQSSGLYSLSSVVTVPSSSLGTQTYICNVNHKPSNTKVDKKVEPKSCDKTHTCPPCPAPELLGGPSVFLFPPKPKDTLMISRTPEVTCVVVDVSHEDPEVKFNWYVDGVEVHNAKTKPREEQYNSTYRVVSVLTVLHQDWLNGKEYKCKVSNKALPAPIEKTISKAKGQPREPQVYTLPPSREEMTKNQVSLTCLVKGFYPSDIAVEWESNGQPENNYKTTPPVLDSDGSFFLYSKLTVDKSRWQQGNVFSCSVMHEALHNHYTQKSLSLSPGKGGGGSGGGGSGGGGSKESCDVQLYIKRQSEHSILAGDPFELECPVKYCANRPHVTWCKLNGTTCVKLEDRQTSWKEEKNISFFILHFEPVLPNDNGSYRCSANFQSNLIESHSTTLYVTDVKSASERPSKDEMAS

SEQ ID NO: 566 - protein, 700 aa, Artificial Sequence
  Description of Artificial Sequence: Synthetic polypeptide
SDTGRPFVEMYSEIPEIIHMTEGRELVIPCRVTSPNITVTLKKFPLDTLIPDGKRIIWDSRKGFIISNATYKEIGLLTCEATVNGHLYKTNYLTHRQTNTIIDVVLSPSHGIELSVGEKLVLNCTARTELNVGIDFNWEYPSSKHQHKKLVNRDLKTQSGSEMKKFLSTLTIDGVTRSDQGLYTCAASSGLMTKKNSTFVRVHEKASTKGPSVFPLAPSSKSTSGGTAALGCLVKDYFPEPVTVSWNSGALTSGVHTFPAVLQSSGLYSLSSVVTVPSSSLGTQTYICNVNHKPSNTKVDKKVEPKSCDKTHTCPPCPAPELLGGPSVFLFPPKPKDTLMISRTPEVTCVVVDVSHEDPEVKFNWYVDGVEVHNAKTKPREEQYNSTYRVVSVLTVLHQDWLNGKEYKCKVSNKALPAPIEKTISKAKGQPREPQVYTLPPSREEMTKNQVSLTCLVKGFYPSDIAVEWESNGQPENNYKTTPPVLDSDGSFFLYSKLTVDKSRWQQGNVFSCSVMHEALHNHYTQKSLSLSPGKGGGGSGGGGSGGGGSPGWFLDSPDRPWNPPTFSPALLVVTEGDNATFTCSFSNTSESFVLNWYRMSPSNQTDKLAAFPEDRSQPGQDCRFRVTQLPNGRDFHMSVVRARRNDSGTYLCGAISLAPKAQIKESLRAELRVTERRAEVPTAHPSPSPRPAGQFQTLV

SEQ ID NO: 567 - protein, 1080 aa, Artificial Sequence
  Description of Artificial Sequence: Synthetic polypeptide
SDTGRPFVEMYSEIPEIIHMTEGRELVIPCRVTSPNITVTLKKFPLDTLIPDGKRIIWDSRKGFIISNATYKEIGLLTCEATVNGHLYKTNYLTHRQTNTIIDVVLSPSHGIELSVGEKLVLNCTARTELNVGIDFNWEYPSSKHQHKKLVNRDLKTQSGSEMKKFLSTLTIDGVTRSDQGLYTCAASSGLMTKKNSTFVRVHEKASTKGPSVFPLAPSSKSTSGGTAALGCLVKDYFPEPVTVSWNSGALTSGVHTFPAVLQSSGLYSLSSVVTVPSSSLGTQTYICNVNHKPSNTKVDKKVEPKSCDKTHTCPPCPAPELLGGPSVFLFPPKPKDTLMISRTPEVTCVVVDVSHEDPEVKFNWYVDGVEVHNAKTKPREEQYNSTYRVVSVLTVLHQDWLNGKEYKCKVSNKALPAPIEKTISKAKGQPREPQVYTLPPSREEMTKNQVSLTCLVKGFYPSDIAVEWESNGQPENNYKTTPPVLDSDGSFFLYSKLTVDKSRWQQGNVFSCSVMHEALHNHYTQKSLSLSPGKGGGGSGGGGSGGGGSMDGRFWIRVQESVMVPEGLCISVPCSFSYPRQDWTGSTPAYGYWFKAVTETTKGAPVATNHQSREVEMSTRGRFQLTGDPAKGNCSLVIRDAQMQDESQYFFRVERGSYVRYNFMNDGFFLKVTALTQKPDVYIPETLEPGQPVTVICVFNWAFEECPPPSFSWTGAALSSQGTKPTTSHFSVLSFTPRPQDHNTDLTCHVDFSRKGVSAQRTVRLRVAYAPRDLVISISRDNTPALEPQPQGNVPYLEAQKGQFLRLLCAADSQPPATLSWVLQNRVLSSSHPWGPRPLGLELPGVKAGDSGRYTCRAENRLGSQQRALDLSVQYPPENLRVMVSQANRTVLENLGNGTSLPVLEGQSLCLVCVTHSSPPARLSWTQRGQVLSPSQPSDPGVLELPRVQVEHEGEFTCHARHPLGSQHVSLSLSVHYSPKLLGPSCSWEAEGLHCSCSSQASPAPSLRWWLGEELLEGNSSQDSFEVTPSSAGPWANSSLSLHGGLSSGLRLRCEAWNVHGAQSGSILQLPDKKGLIST

SEQ ID NO: 568 - protein, 669 aa, Artificial Sequence
  Description of Artificial Sequence: Synthetic polypeptide
SDTGRPFVEMYSEIPEIIHMTEGRELVIPCRVTSPNITVTLKKFPLDTLIPDGKRIIWDSRKGFIISNATYKEIGLLTCEATVNGHLYKTNYLTHRQTNTIIDVVLSPSHGIELSVGEKLVLNCTARTELNVGIDFNWEYPSSKHQHKKLVNRDLKTQSGSEMKKFLSTLTIDGVTRSDQGLYTCAASSGLMTKKNSTFVRVHEKASTKGPSVFPLAPSSKSTSGGTAALGCLVKDYFPEPVTVSWNSGALTSGVHTFPAVLQSSGLYSLSSVVTVPSSSLGTQTYICNVNHKPSNTKVDKKVEPKSCDKTHTCPPCPAPELLGGPSVFLFPPKPKDTLMISRTPEVTCVVVDVSHEDPEVKFNWYVDGVEVHNAKTKPREEQYNSTYRVVSVLTVLHQDWLNGKEYKCKVSNKALPAPIEKTISKAKGQPREPQVYTLPPSREEMTKNQVSLTCLVKGFYPSDIAVEWESNGQPENNYKTTPPVLDSDGSFFLYSKLTVDKSRWQQGNVFSCSVMHEALHNHYTQKSLSLSPGKGGGGSGGGGSGGGGSEEELQVIQPDKSVLVAAGETATLRCTATSLIPVGPIQWFRGAGPGRELIYNQKEGHFPRVTTVSDLTKRNNMDFSIRIGNITPADAGTYYCVKFRKGSPDDVEFKSGAGTELSVRAKPS

SEQ ID NO: 569 - protein, 687 aa, Artificial Sequence
  Description of Artificial Sequence: Synthetic polypeptide
SDTGRPFVEMYSEIPEIIHMTEGRELVIPCRVTSPNITVTLKKFPLDTLIPDGKRIIWDSRKGFIISNATYKEIGLLTCEATVNGHLYKTNYLTHRQTNTIIDVVLSPSHGIELSVGEKLVLNCTARTELNVGIDFNWEYPSSKHQHKKLVNRDLKTQSGSEMKKFLSTLTIDGVTRSDQGLYTCAASSGLMTKKNSTFVRVHEKASTKGPSVFPLAPSSKSTSGGTAALGCLVKDYFPEPVTVSWNSGALTSGVHTFPAVLQSSGLYSLSSVVTVPSSSLGTQTYICNVNHKPSNTKVDKKVEPKSCDKTHTCPPCPAPELLGGPSVFLFPPKPKDTLMISRTPEVTCVVVDVSHEDPEVKFNWYVDGVEVHNAKTKPREEQYNSTYRVVSVLTVLHQDWLNGKEYKCKVSNKALPAPIEKTISKAKGQPREPQVYTLPPSREEMTKNQVSLTCLVKGFYPSDIAVEWESNGQPENNYKTTPPVLDSDGSFFLYSKLTVDKSRWQQGNVFSCSVMHEALHNHYTQKSLSLSPGKGGGGSGGGGSGGGGSTIPPHVQKSVNNDMIVTDNNGAVKFPQLCKFCDVRFSTCDNQKSCMSNCSITSICEKPQEVCVAVWRKNDENITLETVCHDPKLPYHDFILEDAASPKCIMKEKKKPGETFFMCSCSSDECNDNIIFSEEYNTSNPD

SEQ ID NO: 570 - protein, 731 aa, Artificial Sequence
  Description of Artificial Sequence: Synthetic polypeptide
SDTGRPFVEMYSEIPEIIHMTEGRELVIPCRVTSPNITVTLKKFPLDTLIPDGKRIIWDSRKGFIISNATYKEIGLLTCEATVNGHLYKTNYLTHRQTNTIIDVVLSPSHGIELSVGEKLVLNCTARTELNVGIDFNWEYPSSKHQHKKLVNRDLKTQSGSEMKKFLSTLTIDGVTRSDQGLYTCAASSGLMTKKNSTFVRVHEKASTKGPSVFPLAPSSKSTSGGTAALGCLVKDYFPEPVTVSWNSGALTSGVHTFPAVLQSSGLYSLSSVVTVPSSSLGTQTYICNVNHKPSNTKVDKKVEPKSCDKTHTCPPCPAPELLGGPSVFLFPPKPKDTLMISRTPEVTCVVVDVSHEDPEVKFNWYVDGVEVHNAKTKPREEQYNSTYRVVSVLTVLHQDWLNGKEYKCKVSNKALPAPIEKTISKAKGQPREPQVYTLPPSREEMTKNQVSLTCLVKGFYPSDIAVEWESNGQPENNYKTTPPVLDSDGSFFLYSKLTVDKSRWQQGNVFSCSVMHEALHNHYTQKSLSLSPGKGGGGSGGGGSGGGGSSEVEYRAEVGQNAYLPCFYTPAAPGNLVPVCWGKGACPVFECGNVVLRTDERDVNYWTSRYWLNGDFRKGDVSLTIENVTLADSGIYCCRIQIPGIMNDEKFNLKLVIKPAKVTPAPTRQRDFTAAFPRMLTTRGHGPAETQTLGSLPDINLTQISTLANELRDSRLANDLRDSGATIRIG

SEQ ID NO: 571 - protein, 980 aa, Artificial Sequence
  Description of Artificial Sequence: Synthetic polypeptide
KESCDVQLYIKRQSEHSILAGDPFELECPVKYCANRPHVTWCKLNGTTCVKLEDRQTSWKEEKNISFFILHFEPVLPNDNGSYRCSANFQSNLIESHSTTLYVTDVKSASERPSKDEMASASTKGPSVFPLAPCSRSTSESTAALGCLVKDYFPEPVTVSWNSGALTSGVHTFPAVLQSSGLYSLSSVVTVPSSSLGTKTYTCNVDHKPSNTKVDKRVESKYGPPCPSCPAPEFLGGPSVFLFPPKPKDTLMISRTPEVTCVVVDVSQEDPEVQFNWYVDGVEVHNAKTKPREEQFNSTYRVVSVLTVLHQDWLNGKEYKCKVSNKGLPSSIEKTISKAKGQPREPQVYTLPPSQEEMTKNQVSLTCLVKGFYPSDIAVEWESNGQPENNYKTTPPVLDSDGSFFLYSRLTVDKSRWQEGNVFSCSVMHEALHNHYTQKSLSLSLGKGGGGSGGGGSGGGGSIWELKKDVYVVELDWYPDAPGEMVVLTCDTPEEDGITWTLDQSSEVLGSGKTLTIQVKEFGDAGQYTCHKGGEVLSHSLLLLHKKEDGIWSTDILKDQKEPKNKTFLRCEAKNYSGRFTCWWLTTISTDLTFSVKSSRGSSDPQGVTCGAATLSAERVRGDNKEYEYSVECQEDSACPAAEESLPIEVMVDAVHKLKYENYTSSFFIRDIIKPDPPKNLQLKPLKNSRQVEVSWEYPDTWSTPHSYFSLTFCVQVQGKSKREKKDRVFTDKTSATVICRKNASISVRAQDRYYSSSWSEWASVPCSGGGGSGGGGSGGGGSRNLPVATPDPGMFPCLHHSQNLLRAVSNMLQKARQTLEFYPCTSEEIDHEDITKDKTSTVEACLPLELTKNESCLNSRETSFITNGSCLASRKTSFMMALCLSSIYEDLKMYQVEFKTMNAKLLMDPKRQIFLDQNMLAVIDELMQALNFNSETVPQKSSLEEPDFYKTKIKLCILLHAFRIRAVTIDRVMSYLNAS

SEQ ID NO: 572 - protein, 980 aa, Artificial Sequence
  Description of Artificial Sequence: Synthetic polypeptide
IWELKKDVYVVELDWYPDAPGEMVVLTCDTPEEDGITWTLDQSSEVLGSGKTLTIQVKEFGDAGQYTCHKGGEVLSHSLLLLHKKEDGIWSTDILKDQKEPKNKTFLRCEAKNYSGRFTCWWLTTISTDLTFSVKSSRGSSDPQGVTCGAATLSAERVRGDNKEYEYSVECQEDSACPAAEESLPIEVMVDAVHKLKYENYTSSFFIRDIIKPDPPKNLQLKPLKNSRQVEVSWEYPDTWSTPHSYFSLTFCVQVQGKSKREKKDRVFTDKTSATVICRKNASISVRAQDRYYSSSWSEWASVPCSGGGGSGGGGSGGGGSRNLPVATPDPGMFPCLHHSQNLLRAVSNMLQKARQTLEFYPCTSEEIDHEDITKDKTSTVEACLPLELTKNESCLNSRETSFITNGSCLASRKTSFMMALCLSSIYEDLKMYQVEFKTMNAKLLMDPKRQIFLDQNMLAVIDELMQALNFNSETVPQKSSLEEPDFYKTKIKLCILLHAFRIRAVTIDRVMSYLNASASTKGPSVFPLAPCSRSTSESTAALGCLVKDYFPEPVTVSWNSGALTSGVHTFPAVLQSSGLYSLSSVVTVPSSSLGTKTYTCNVDHKPSNTKVDKRVESKYGPPCPSCPAPEFLGGPSVFLFPPKPKDTLMISRTPEVTCVVVDVSQEDPEVQFNWYVDGVEVHNAKTKPREEQFNSTYRVVSVLTVLHQDWLNGKEYKCKVSNKGLPSSIEKTISKAKGQPREPQVYTLPPSQEEMTKNQVSLTCLVKGFYPSDIAVEWESNGQPENNYKTTPPVLDSDGSFFLYSRLTVDKSRWQEGNVFSCSVMHEALHNHYTQKSLSLSLGKGGGGSGGGGSGGGGSKESCDVQLYIKRQSEHSILAGDPFELECPVKYCANRPHVTWCKLNGTTCVKLEDRQTSWKEEKNISFFILHFEPVLPNDNGSYRCSANFQSNLIESHSTTLYVTDVKSASERPSKDEMAS

SEQ ID NO: 573 - protein, 576 aa, Artificial Sequence
  Description of Artificial Sequence: Synthetic polypeptide
KESCDVQLYIKRQSEHSILAGDPFELECPVKYCANRPHVTWCKLNGTTCVKLEDRQTSWKEEKNISFFILHFEPVLPNDNGSYRCSANFQSNLIESHSTTLYVTDVKSASERPSKDEMASASTKGPSVFPLAPCSRSTSESTAALGCLVKDYFPEPVTVSWNSGALTSGVHTFPAVLQSSGLYSLSSVVTVPSSSLGTKTYTCNVDHKPSNTKVDKRVESKYGPPCPSCPAPEFLGGPSVFLFPPKPKDTLMISRTPEVTCVVVDVSQEDPEVQFNWYVDGVEVHNAKTKPREEQFNSTYRVVSVLTVLHQDWLNGKEYKCKVSNKGLPSSIEKTISKAKGQPREPQVYTLPPSQEEMTKNQVSLTCLVKGFYPSDIAVEWESNGQPENNYKTTPPVLDSDGSFFLYSRLTVDKSRWQEGNVFSCSVMHEALHNHYTQKSLSLSLGKGGGGSGGGGSGGGGSNWVNVISDLKKIEDLIQSMHIDATLYTESDVHPSCKVTAMKCFLLELQVISLESGDASIHDTVENLIILANNSLSSNGNVTESGCKECEELEEKNIKEFLQSFVHIVQMFINTS

SEQ ID NO: 574 - protein, 576 aa, Artificial Sequence
  Description of Artificial Sequence: Synthetic polypeptide
NWVNVISDLKKIEDLIQSMHIDATLYTESDVHPSCKVTAMKCFLLELQVISLESGDASIHDTVENLIILANNSLSSNGNVTESGCKECEELEEKNIKEFLQSFVHIVQMFINTSASTKGPSVFPLAPCSRSTSESTAALGCLVKDYFPEPVTVSWNSGALTSGVHTFPAVLQSSGLYSLSSVVTVPSSSLGTKTYTCNVDHKPSNTKVDKRVESKYGPPCPSCPAPEFLGGPSVFLFPPKPKDTLMISRTPEVTCVVVDVSQEDPEVQFNWYVDGVEVHNAKTKPREEQFNSTYRVVSVLTVLHQDWLNGKEYKCKVSNKGLPSSIEKTISKAKGQPREPQVYTLPPSQEEMTKNQVSLTCLVKGFYPSDIAVEWESNGQPENNYKTTPPVLDSDGSFFLYSRLTVDKSRWQEGNVFSCSVMHEALHNHYTQKSLSLSLGKGGGGSGGGGSGGGGSKESCDVQLYIKRQSEHSILAGDPFELECPVKYCANRPHVTWCKLNGTTCVKLEDRQTSWKEEKNISFFILHFEPVLPNDNGSYRCSANFQSNLIESHSTTLYVTDVKSASERPSKDEMAS

SEQ ID NO: 575 - protein, 1010 aa, Artificial Sequence
  Description of Artificial Sequence: Synthetic polypeptide
PGWFLDSPDRPWNPPTFSPALLVVTEGDNATFTCSFSNTSESFVLNWYRMSPSNQTDKLAAFPEDRSQPGQDCRFRVTQLPNGRDFHMSVVRARRNDSGTYLCGAISLAPKAQIKESLRAELRVTERRAEVPTAHPSPSPRPAGQFQTLVASTKGPSVFPLAPCSRSTSESTAALGCLVKDYFPEPVTVSWNSGALTSGVHTFPAVLQSSGLYSLSSVVTVPSSSLGTKTYTCNVDHKPSNTKVDKRVESKYGPPCPSCPAPEFLGGPSVFLFPPKPKDTLMISRTPEVTCVVVDVSQEDPEVQFNWYVDGVEVHNAKTKPREEQFNSTYRVVSVLTVLHQDWLNGKEYKCKVSNKGLPSSIEKTISKAKGQPREPQVYTLPPSQEEMTKNQVSLTCLVKGFYPSDIAVEWESNGQPENNYKTTPPVLDSDGSFFLYSRLTVDKSRWQEGNVFSCSVMHEALHNHYTQKSLSLSLGKGGGGSGGGGSGGGGSIWELKKDVYVVELDWYPDAPGEMVVLTCDTPEEDGITWTLDQSSEVLGSGKTLTIQVKEFGDAGQYTCHKGGEVLSHSLLLLHKKEDGIWSTDILKDQKEPKNKTFLRCEAKNYSGRFTCWWLTTISTDLTFSVKSSRGSSDPQGVTCGAATLSAERVRGDNKEYEYSVECQEDSACPAAEESLPIEVMVDAVHKLKYENYTSSFFIRDIIKPDPPKNLQLKPLKNSRQVEVSWEYPDTWSTPHSYFSLTFCVQVQGKSKREKKDRVFTDKTSATVICRKNASISVRAQDRYYSSSWSEWASVPCSGGGGSGGGGSGGGGSRNLPVATPDPGMFPCLHHSQNLLRAVSNMLQKARQTLEFYPCTSEEIDHEDITKDKTSTVEACLPLELTKNESCLNSRETSFITNGSCLASRKTSFMMALCLSSIYEDLKMYQVEFKTMNAKLLMDPKRQIFLDQNMLAVIDELMQALNFNSETVPQKSSLEEPDFYKTKIKLCILLHAFRIRAVTIDRVMSYLNAS

SEQ ID NO: 576 - protein, 1010 aa, Artificial Sequence
  Description of Artificial Sequence: Synthetic polypeptide
IWELKKDVYVVELDWYPDAPGEMVVLTCDTPEEDGITWTLDQSSEVLGSGKTLTIQVKEFGDAGQYTCHKGGEVLSHSLLLLHKKEDGIWSTDILKDQKEPKNKTFLRCEAKNYSGRFTCWWLTTISTDLTFSVKSSRGSSDPQGVTCGAATLSAERVRGDNKEYEYSVECQEDSACPAAEESLPIEVMVDAVHKLKYENYTSSFFIRDIIKPDPPKNLQLKPLKNSRQVEVSWEYPDTWSTPHSYFSLTFCVQVQGKSKREKKDRVFTDKTSATVICRKNASISVRAQDRYYSSSWSEWASVPCSGGGGSGGGGSGGGGSRNLPVATPDPGMFPCLHHSQNLLRAVSNMLQKARQTLEFYPCTSEEIDHEDITKDKTSTVEACLPLELTKNESCLNSRETSFITNGSCLASRKTSFMMALCLSSIYEDLKMYQVEFKTMNAKLLMDPKRQIFLDQNMLAVIDELMQALNFNSETVPQKSSLEEPDFYKTKIKLCILLHAFRIRAVTIDRVMSYLNASASTKGPSVFPLAPCSRSTSESTAALGCLVKDYFPEPVTVSWNSGALTSGVHTFPAVLQSSGLYSLSSVVTVPSSSLGTKTYTCNVDHKPSNTKVDKRVESKYGPPCPSCPAPEFLGGPSVFLFPPKPKDTLMISRTPEVTCVVVDVSQEDPEVQFNWYVDGVEVHNAKTKPREEQFNSTYRVVSVLTVLHQDWLNGKEYKCKVSNKGLPSSIEKTISKAKGQPREPQVYTLPPSQEEMTKNQVSLTCLVKGFYPSDIAVEWESNGQPENNYKTTPPVLDSDGSFFLYSRLTVDKSRWQEGNVFSCSVMHEALHNHYTQKSLSLSLGKGGGGSGGGGSGGGGSPGWFLDSPDRPWNPPTFSPALLVVTEGDNATFTCSFSNTSESFVLNWYRMSPSNQTDKLAAFPEDRSQPGQDCRFRVTQLPNGRDFHMSVVRARRNDSGTYLCGAISLAPKAQIKESLRAELRVTERRAEVPTAHPSPSPRPAGQFQTLV

SEQ ID NO: 577 - protein, 606 aa, Artificial Sequence
  Description of Artificial Sequence: Synthetic polypeptide
PGWFLDSPDRPWNPPTFSPALLVVTEGDNATFTCSFSNTSESFVLNWYRMSPSNQTDKLAAFPEDRSQPGQDCRFRVTQLPNGRDFHMSVVRARRNDSGTYLCGAISLAPKAQIKESLRAELRVTERRAEVPTAHPSPSPRPAGQFQTLVASTKGPSVFPLAPCSRSTSESTAALGCLVKDYFPEPVTVSWNSGALTSGVHTFPAVLQSSGLYSLSSVVTVPSSSLGTKTYTCNVDHKPSNTKVDKRVESKYGPPCPSCPAPEFLGGPSVFLFPPKPKDTLMISRTPEVTCVVVDVSQEDPEVQFNWYVDGVEVHNAKTKPREEQFNSTYRVVSVLTVLHQDWLNGKEYKCKVSNKGLPSSIEKTISKAKGQPREPQVYTLPPSQEEMTKNQVSLTCLVKGFYPSDIAVEWESNGQPENNYKTTPPVLDSDGSFFLYSRLTVDKSRWQEGNVFSCSVMHEALHNHYTQKSLSLSLGKGGGGSGGGGSGGGGSNWVNVISDLKKIEDLIQSMHIDATLYTESDVHPSCKVTAMKCFLLELQVISLESGDASIHDTVENLIILANNSLSSNGNVTESGCKECEELEEKNIKEFLQSFVHIVQMFINTS

SEQ ID NO: 578 - protein, 606 aa, Artificial Sequence
  Description of Artificial Sequence: Synthetic polypeptide
NWVNVISDLKKIEDLIQSMHIDATLYTESDVHPSCKVTAMKCFLLELQVISLESGDASIHDTVENLIILANNSLSSNGNVTESGCKECEELEEKNIKEFLQSFVHIVQMFINTSASTKGPSVFPLAPCSRSTSESTAALGCLVKDYFPEPVTVSWNSGALTSGVHTFPAVLQSSGLYSLSSVVTVPSSSLGTKTYTCNVDHKPSNTKVDKRVESKYGPPCPSCPAPEFLGGPSVFLFPPKPKDTLMISRTPEVTCVVVDVSQEDPEVQFNWYVDGVEVHNAKTKPREEQFNSTYRVVSVLTVLHQDWLNGKEYKCKVSNKGLPSSIEKTISKAKGQPREPQVYTLPPSQEEMTKNQVSLTCLVKGFYPSDIAVEWESNGQPENNYKTTPPVLDSDGSFFLYSRLTVDKSRWQEGNVFSCSVMHEALHNHYTQKSLSLSLGKGGGGSGGGGSGGGGSPGWFLDSPDRPWNPPTFSPALLVVTEGDNATFTCSFSNTSESFVLNWYRMSPSNQTDKLAAFPEDRSQPGQDCRFRVTQLPNGRDFHMSVVRARRNDSGTYLCGAISLAPKAQIKESLRAELRVTERRAEVPTAHPSPSPRPAGQFQTLV

SEQ ID NO: 579 - protein, 1390 aa, Artificial Sequence
  Description of Artificial Sequence: Synthetic polypeptide
MDGRFWIRVQESVMVPEGLCISVPCSFSYPRQDWTGSTPAYGYWFKAVTETTKGAPVATNHQSREVEMSTRGRFQLTGDPAKGNCSLVIRDAQMQDESQYFFRVERGSYVRYNFMNDGFFLKVTALTQKPDVYIPETLEPGQPVTVICVFNWAFEECPPPSFSWTGAALSSQGTKPTTSHFSVLSFTPRPQDHNTDLTCHVDFSRKGVSAQRTVRLRVAYAPRDLVISISRDNTPALEPQPQGNVPYLEAQKGQFLRLLCAADSQPPATLSWVLQNRVLSSSHPWGPRPLGLELPGVKAGDSGRYTCRAENRLGSQQRALDLSVQYPPENLRVMVSQANRTVLENLGNGTSLPVLEGQSLCLVCVTHSSPPARLSWTQRGQVLSPSQPSDPGVLELPRVQVEHEGEFTCHARHPLGSQHVSLSLSVHYSPKLLGPSCSWEAEGLHCSCSSQASPAPSLRWWLGEELLEGNSSQDSFEVTPSSAGPWANSSLSLHGGLSSGLRLRCEAWNVHGAQSGSILQLPDKKGLISTASTKGPSVFPLAPCSRSTSESTAALGCLVKDYFPEPVTVSWNSGALTSGVHTFPAVLQSSGLYSLSSVVTVPSSSLGTKTYTCNVDHKPSNTKVDKRVESKYGPPCPSCPAPEFLGGPSVFLFPPKPKDTLMISRTPEVTCVVVDVSQEDPEVQFNWYVDGVEVHNAKTKPREEQFNSTYRVVSVLTVLHQDWLNGKEYKCKVSNKGLPSSIEKTISKAKGQPREPQVYTLPPSQEEMTKNQVSLTCLVKGFYPSDIAVEWESNGQPENNYKTTPPVLDSDGSFFLYSRLTVDKSRWQEGNVFSCSVMHEALHNHYTQKSLSLSLGKGGGGSGGGGSGGGGSIWELKKDVYVVELDWYPDAPGEMVVLTCDTPEEDGITWTLDQSSEVLGSGKTLTIQVKEFGDAGQYTCHKGGEVLSHSLLLLHKKEDGIWSTDILKDQKEPKNKTFLRCEAKNYSGRFTCWWLTTISTDLTFSVKSSRGSSDPQGVTCGAATLSAERVRGDNKEYEYSVECQEDSACPAAEESLPIEVMVDAVHKLKYENYTSSFFIRDIIKPDPPKNLQLKPLKNSRQVEVSWEYPDTWSTPHSYFSLTFCVQVQGKSKREKKDRVFTDKTSATVICRKNASISVRAQDRYYSSSWSEWASVPCSGGGGSGGGGSGGGGSRNLPVATPDPGMFPCLHHSQNLLRAVSNMLQKARQTLEFYPCTSEEIDHEDITKDKTSTVEACLPLELTKNESCLNSRETSFITNGSCLASRKTSFMMALCLSSIYEDLKMYQVEFKTMNAKLLMDPKRQIFLDQNMLAVIDELMQALNFNSETVPQKSSLEEPDFYKTKIKLCILLHAFRIRAVTIDRVMSYLNAS

SEQ ID NO: 580 - protein, 1390 aa, Artificial Sequence
  Description of Artificial Sequence: Synthetic polypeptide
IWELKKDVYVVELDWYPDAPGEMVVLTCDTPEEDGITWTLDQSSEVLGSGKTLTIQVKEFGDAGQYTCHKGGEVLSHSLLLLHKKEDGIWSTDILKDQKEPKNKTFLRCEAKNYSGRFTCWWLTTISTDLTFSVKSSRGSSDPQGVTCGAATLSAERVRGDNKEYEYSVECQEDSACPAAEESLPIEVMVDAVHKLKYENYTSSFFIRDIIKPDPPKNLQLKPLKNSRQVEVSWEYPDTWSTPHSYFSLTFCVQVQGKSKREKKDRVFTDKTSATVICRKNASISVRAQDRYYSSSWSEWASVPCSGGGGSGGGGSGGGGSRNLPVATPDPGMFPCLHHSQNLLRAVSNMLQKARQTLEFYPCTSEEIDHEDITKDKTSTVEACLPLELTKNESCLNSRETSFITNGSCLASRKTSFMMALCLSSIYEDLKMYQVEFKTMNAKLLMDPKRQIFLDQNMLAVIDELMQALNFNSETVPQKSSLEEPDFYKTKIKLCILLHAFRIRAVTIDRVMSYLNASASTKGPSVFPLAPCSRSTSESTAALGCLVKDYFPEPVTVSWNSGALTSGVHTFPAVLQSSGLYSLSSVVTVPSSSLGTKTYTCNVDHKPSNTKVDKRVESKYGPPCPSCPAPEFLGGPSVFLFPPKPKDTLMISRTPEVTCVVVDVSQEDPEVQFNWYVDGVEVHNAKTKPREEQFNSTYRVVSVLTVLHQDWLNGKEYKCKVSNKGLPSSIEKTISKAKGQPREPQVYTLPPSQEEMTKNQVSLTCLVKGFYPSDIAVEWESNGQPENNYKTTPPVLDSDGSFFLYSRLTVDKSRWQEGNVFSCSVMHEALHNHYTQKSLSLSLGKGGGGSGGGGSGGGGSMDGRFWIRVQESVMVPEGLCISVPCSFSYPRQDWTGSTPAYGYWFKAVTETTKGAPVATNHQSREVEMSTRGRFQLTGDPAKGNCSLVIRDAQMQDESQYFFRVERGSYVRYNFMNDGFFLKVTALTQKPDVYIPETLEPGQPVTVICVFNWAFEECPPPSFSWTGAALSSQGTKPTTSHFSVLSFTPRPQDHNTDLTCHVDFSRKGVSAQRTVRLRVAYAPRDLVISISRDNTPALEPQPQGNVPYLEAQKGQFLRLLCAADSQPPATLSWVLQNRVLSSSHPWGPRPLGLELPGVKAGDSGRYTCRAENRLGSQQRALDLSVQYPPENLRVMVSQANRTVLENLGNGTSLPVLEGQSLCLVCVTHSSPPARLSWTQRGQVLSPSQPSDPGVLELPRVQVEHEGEFTCHARHPLGSQHVSLSLSVHYSPKLLGPSCSWEAEGLHCSCSSQASPAPSLRWWLGEELLEGNSSQDSFEVTPSSAGPWANSSLSLHGGLSSGLRLRCEAWNVHGAQSGSILQLPDKKGLIST

SEQ ID NO: 581 - protein, 986 aa, Artificial Sequence
  Description of Artificial Sequence: Synthetic polypeptide
MDGRFWIRVQESVMVPEGLCISVPCSFSYPRQDWTGSTPAYGYWFKAVTETTKGAPVATNHQSREVEMSTRGRFQLTGDPAKGNCSLVIRDAQMQDESQYFFRVERGSYVRYNFMNDGFFLKVTALTQKPDVYIPETLEPGQPVTVICVFNWAFEECPPPSFSWTGAALSSQGTKPTTSHFSVLSFTPRPQDHNTDLTCHVDFSRKGVSAQRTVRLRVAYAPRDLVISISRDNTPALEPQPQGNVPYLEAQKGQFLRLLCAADSQPPATLSWVLQNRVLSSSHPWGPRPLGLELPGVKAGDSGRYTCRAENRLGSQQRALDLSVQYPPENLRVMVSQANRTVLENLGNGTSLPVLEGQSLCLVCVTHSSPPARLSWTQRGQVLSPSQPSDPGVLELPRVQVEHEGEFTCHARHPLGSQHVSLSLSVHYSPKLLGPSCSWEAEGLHCSCSSQASPAPSLRWWLGEELLEGNSSQDSFEVTPSSAGPWANSSLSLHGGLSSGLRLRCEAWNVHGAQSGSILQLPDKKGLISTASTKGPSVFPLAPCSRSTSESTAALGCLVKDYFPEPVTVSWNSGALTSGVHTFPAVLQSSGLYSLSSVVTVPSSSLGTKTYTCNVDHKPSNTKVDKRVESKYGPPCPSCPAPEFLGGPSVFLFPPKPKDTLMISRTPEVTCVVVDVSQEDPEVQFNWYVDGVEVHNAKTKPREEQFNSTYRVVSVLTVLHQDWLNGKEYKCKVSNKGLPSSIEKTISKAKGQPREPQVYTLPPSQEEMTKNQVSLTCLVKGFYPSDIAVEWESNGQPENNYKTTPPVLDSDGSFFLYSRLTVDKSRWQEGNVFSCSVMHEALHNHYTQKSLSLSLGKGGGGSGGGGSGGGGSNWVNVISDLKKIEDLIQSMHIDATLYTESDVHPSCKVTAMKCFLLELQVISLESGDASIHDTVENLIILANNSLSSNGNVTESGCKECEELEEKNIKEFLQSFVHIVQMFINTS

SEQ ID NO: 582 - protein, 986 aa, Artificial Sequence
  Description of Artificial Sequence: Synthetic polypeptide
NWVNVISDLKKIEDLIQSMHIDATLYTESDVHPSCKVTAMKCFLLELQVISLESGDASIHDTVENLIILANNSLSSNGNVTESGCKECEELEEKNIKEFLQSFVHIVQMFINTSASTKGPSVFPLAPCSRSTSESTAALGCLVKDYFPEPVTVSWNSGALTSGVHTFPAVLQSSGLYSLSSVVTVPSSSLGTKTYTCNVDHKPSNTKVDKRVESKYGPPCPSCPAPEFLGGPSVFLFPPKPKDTLMISRTPEVTCVVVDVSQEDPEVQFNWYVDGVEVHNAKTKPREEQFNSTYRVVSVLTVLHQDWLNGKEYKCKVSNKGLPSSIEKTISKAKGQPREPQVYTLPPSQEEMTKNQVSLTCLVKGFYPSDIAVEWESNGQPENNYKTTPPVLDSDGSFFLYSRLTVDKSRWQEGNVFSCSVMHEALHNHYTQKSLSLSLGKGGGGSGGGGSGGGGSMDGRFWIRVQESVMVPEGLCISVPCSFSYPRQDWTGSTPAYGYWFKAVTETTKGAPVATNHQSREVEMSTRGRFQLTGDPAKGNCSLVIRDAQMQDESQYFFRVERGSYVRYNFMNDGFFLKVTALTQKPDVYIPETLEPGQPVTVICVFNWAFEECPPPSFSWTGAALSSQGTKPTTSHFSVLSFTPRPQDHNTDLTCHVDFSRKGVSAQRTVRLRVAYAPRDLVISISRDNTPALEPQPQGNVPYLEAQKGQFLRLLCAADSQPPATLSWVLQNRVLSSSHPWGPRPLGLELPGVKAGDSGRYTCRAENRLGSQQRALDLSVQYPPENLRVMVSQANRTVLENLGNGTSLPVLEGQSLCLVCVTHSSPPARLSWTQRGQVLSPSQPSDPGVLELPRVQVEHEGEFTCHARHPLGSQHVSLSLSVHYSPKLLGPSCSWEAEGLHCSCSSQASPAPSLRWWLGEELLEGNSSQDSFEVTPSSAGPWANSSLSLHGGLSSGLRLRCEAWNVHGAQSGSILQLPDKKGLIST

SEQ ID NO: 583 - protein, 979 aa, Artificial Sequence
  Description of Artificial Sequence: Synthetic polypeptide
EEELQVIQPDKSVLVAAGETATLRCTATSLIPVGPIQWFRGAGPGRELIYNQKEGHFPRVTTVSDLTKRNNMDFSIRIGNITPADAGTYYCVKFRKGSPDDVEFKSGAGTELSVRAKPSASTKGPSVFPLAPCSRSTSESTAALGCLVKDYFPEPVTVSWNSGALTSGVHTFPAVLQSSGLYSLSSVVTVPSSSLGTKTYTCNVDHKPSNTKVDKRVESKYGPPCPSCPAPEFLGGPSVFLFPPKPKDTLMISRTPEVTCVVVDVSQEDPEVQFNWYVDGVEVHNAKTKPREEQFNSTYRVVSVLTVLHQDWLNGKEYKCKVSNKGLPSSIEKTISKAKGQPREPQVYTLPPSQEEMTKNQVSLTCLVKGFYPSDIAVEWESNGQPENNYKTTPPVLDSDGSFFLYSRLTVDKSRWQEGNVFSCSVMHEALHNHYTQKSLSLSLGKGGGGSGGGGSGGGGSIWELKKDVYVVELDWYPDAPGEMVVLTCDTPEEDGITWTLDQSSEVLGSGKTLTIQVKEFGDAGQYTCHKGGEVLSHSLLLLHKKEDGIWSTDILKDQKEPKNKTFLRCEAKNYSGRFTCWWLTTISTDLTFSVKSSRGSSDPQGVTCGAATLSAERVRGDNKEYEYSVECQEDSACPAAEESLPIEVMVDAVHKLKYENYTSSFFIRDIIKPDPPKNLQLKPLKNSRQVEVSWEYPDTWSTPHSYFSLTFCVQVQGKSKREKKDRVFTDKTSATVICRKNASISVRAQDRYYSSSWSEWASVPCSGGGGSGGGGSGGGGSRNLPVATPDPGMFPCLHHSQNLLRAVSNMLQKARQTLEFYPCTSEEIDHEDITKDKTSTVEACLPLELTKNESCLNSRETSFITNGSCLASRKTSFMMALCLSSIYEDLKMYQVEFKTMNAKLLMDPKRQIFLDQNMLAVIDELMQALNFNSETVPQKSSLEEPDFYKTKIKLCILLHAFRIRAVTIDRVMSYLNAS

SEQ ID NO: 584 - protein, 979 aa, Artificial Sequence
  Description of Artificial Sequence: Synthetic polypeptide
IWELKKDVYVVELDWYPDAPGEMVVLTCDTPEEDGITWTLDQSSEVLGSGKTLTIQVKEFGDAGQYTCHKGGEVLSHSLLLLHKKEDGIWSTDILKDQKEPKNKTFLRCEAKNYSGRFTCWWLTTISTDLTFSVKSSRGSSDPQGVTCGAATLSAERVRGDNKEYEYSVECQEDSACPAAEESLPIEVMVDAVHKLKYENYTSSFFIRDIIKPDPPKNLQLKPLKNSRQVEVSWEYPDTWSTPHSYFSLTFCVQVQGKSKREKKDRVFTDKTSATVICRKNASISVRAQDRYYSSSWSEWASVPCSGGGGSGGGGSGGGGSRNLPVATPDPGMFPCLHHSQNLLRAVSNMLQKARQTLEFYPCTSEEIDHEDITKDKTSTVEACLPLELTKNESCLNSRETSFITNGSCLASRKTSFMMALCLSSIYEDLKMYQVEFKTMNAKLLMDPKRQIFLDQNMLAVIDELMQALNFNSETVPQKSSLEEPDFYKTKIKLCILLHAFRIRAVTIDRVMSYLNASASTKGPSVFPLAPCSRSTSESTAALGCLVKDYFPEPVTVSWNSGALTSGVHTFPAVLQSSGLYSLSSVVTVPSSSLGTKTYTCNVDHKPSNTKVDKRVESKYGPPCPSCPAPEFLGGPSVFLFPPKPKDTLMISRTPEVTCVVVDVSQEDPEVQFNWYVDGVEVHNAKTKPREEQFNSTYRVVSVLTVLHQDWLNGKEYKCKVSNKGLPSSIEKTISKAKGQPREPQVYTLPPSQEEMTKNQVSLTCLVKGFYPSDIAVEWESNGQPENNYKTTPPVLDSDGSFFLYSRLTVDKSRWQEGNVFSCSVMHEALHNHYTQKSLSLSLGKGGGGSGGGGSGGGGSEEELQVIQPDKSVLVAAGETATLRCTATSLIPVGPIQWFRGAGPGRELIYNQKEGHFPRVTTVSDLTKRNNMDFSIRIGNITPADAGTYYCVKFRKGSPDDVEFKSGAGTELSVRAKPS

SEQ ID NO: 585 - protein, 575 aa, Artificial Sequence
  Description of Artificial Sequence: Synthetic polypeptide
EEELQVIQPDKSVLVAAGETATLRCTATSLIPVGPIQWFRGAGPGRELIYNQKEGHFPRVTTVSDLTKRNNMDFSIRIGNITPADAGTYYCVKFRKGSPDDVEFKSGAGTELSVRAKPSASTKGPSVFPLAPCSRSTSESTAALGCLVKDYFPEPVTVSWNSGALTSGVHTFPAVLQSSGLYSLSSVVTVPSSSLGTKTYTCNVDHKPSNTKVDKRVESKYGPPCPSCPAPEFLGGPSVFLFPPKPKDTLMISRTPEVTCVVVDVSQEDPEVQFNWYVDGVEVHNAKTKPREEQFNSTYRVVSVLTVLHQDWLNGKEYKCKVSNKGLPSSIEKTISKAKGQPREPQVYTLPPSQEEMTKNQVSLTCLVKGFYPSDIAVEWESNGQPENNYKTTPPVLDSDGSFFLYSRLTVDKSRWQEGNVFSCSVMHEALHNHYTQKSLSLSLGKGGGGSGGGGSGGGGSNWVNVISDLKKIEDLIQSMHIDATLYTESDVHPSCKVTAMKCFLLELQVISLESGDASIHDTVENLIILANNSLSSNGNVTESGCKECEELEEKNIKEFLQSFVHIVQMFINTS

SEQ ID NO: 586 - protein, 575 aa, Artificial Sequence
  Description of Artificial Sequence: Synthetic polypeptide
NWVNVISDLKKIEDLIQSMHIDATLYTESDVHPSCKVTAMKCFLLELQVISLESGDASIHDTVENLIILANNSLSSNGNVTESGCKECEELEEKNIKEFLQSFVHIVQMFINTSASTKGPSVFPLAPCSRSTSESTAALGCLVKDYFPEPVTVSWNSGALTSGVHTFPAVLQSSGLYSLSSVVTVPSSSLGTKTYTCNVDHKPSNTKVDKRVESKYGPPCPSCPAPEFLGGPSVFLFPPKPKDTLMISRTPEVTCVVVDVSQEDPEVQFNWYVDGVEVHNAKTKPREEQFNSTYRVVSVLTVLHQDWLNGKEYKCKVSNKGLPSSIEKTISKAKGQPREPQVYTLPPSQEEMTKNQVSLTCLVKGFYPSDIAVEWESNGQPENNYKTTPPVLDSDGSFFLYSRLTVDKSRWQEGNVFSCSVMHEALHNHYTQKSLSLSLGKGGGGSGGGGSGGGGSEEELQVIQPDKSVLVAAGETATLRCTATSLIPVGPIQWFRGAGPGRELIYNQKEGHFPRVTTVSDLTKRNNMDFSIRIGNITPADAGTYYCVKFRKGSPDDVEFKSGAGTELSVRAKPS

SEQ ID NO: 587 - protein, 997 aa, Artificial Sequence
  Description of Artificial Sequence: Synthetic polypeptide
TIPPHVQKSVNNDMIVTDNNGAVKFPQLCKFCDVRFSTCDNQKSCMSNCSITSICEKPQEVCVAVWRKNDENITLETVCHDPKLPYHDFILEDAASPKCIMKEKKKPGETFFMCSCSSDECNDNIIFSEEYNTSNPDASTKGPSVFPLAPCSRSTSESTAALGCLVKDYFPEPVTVSWNSGALTSGVHTFPAVLQSSGLYSLSSVVTVPSSSLGTKTYTCNVDHKPSNTKVDKRVESKYGPPCPSCPAPEFLGGPSVFLFPPKPKDTLMISRTPEVTCVVVDVSQEDPEVQFNWYVDGVEVHNAKTKPREEQFNSTYRVVSVLTVLHQDWLNGKEYKCKVSNKGLPSSIEKTISKAKGQPREPQVYTLPPSQEEMTKNQVSLTCLVKGFYPSDIAVEWESNGQPENNYKTTPPVLDSDGSFFLYSRLTVDKSRWQEGNVFSCSVMHEALHNHYTQKSLSLSLGKGGGGSGGGGSGGGGSIWELKKDVYVVELDWYPDAPGEMVVLTCDTPEEDGITWTLDQSSEVLGSGKTLTIQVKEFGDAGQYTCHKGGEVLSHSLLLLHKKEDGIWSTDILKDQKEPKNKTFLRCEAKNYSGRFTCWWLTTISTDLTFSVKSSRGSSDPQGVTCGAATLSAERVRGDNKEYEYSVECQEDSACPAAEESLPIEVMVDAVHKLKYENYTSSFFIRDIIKPDPPKNLQLKPLKNSRQVEVSWEYPDTWSTPHSYFSLTFCVQVQGKSKREKKDRVFTDKTSATVICRKNASISVRAQDRYYSSSWSEWASVPCSGGGGSGGGGSGGGGSRNLPVATPDPGMFPCLHHSQNLLRAVSNMLQKARQTLEFYPCTSEEIDHEDITKDKTSTVEACLPLELTKNESCLNSRETSFITNGSCLASRKTSFMMALCLSSIYEDLKMYQVEFKTMNAKLLMDPKRQIFLDQNMLAVIDELMQALNFNSETVPQKSSLEEPDFYKTKIKLCILLHAFRIRAVTIDRVMSYLNAS

SEQ ID NO: 588 - protein, 997 aa, Artificial Sequence
  Description of Artificial Sequence: Synthetic polypeptide
IWELKKDVYVVELDWYPDAPGEMVVLTCDTPEEDGITWTLDQSSEVLGSGKTLTIQVKEFGDAGQYTCHKGGEVLSHSLLLLHKKEDGIWSTDILKDQKEPKNKTFLRCEAKNYSGRFTCWWLTTISTDLTFSVKSSRGSSDPQGVTCGAATLSAERVRGDNKEYEYSVECQEDSACPAAEESLPIEVMVDAVHKLKYENYTSSFFIRDIIKPDPPKNLQLKPLKNSRQVEVSWEYPDTWSTPHSYFSLTFCVQVQGKSKREKKDRVFTDKTSATVICRKNASISVRAQDRYYSSSWSEWASVPCSGGGGSGGGGSGGGGSRNLPVATPDPGMFPCLHHSQNLLRAVSNMLQKARQTLEFYPCTSEEIDHEDITKDKTSTVEACLPLELTKNESCLNSRETSFITNGSCLASRKTSFMMALCLSSIYEDLKMYQVEFKTMNAKLLMDPKRQIFLDQNMLAVIDELMQALNFNSETVPQKSSLEEPDFYKTKIKLCILLHAFRIRAVTIDRVMSYLNASASTKGPSVFPLAPCSRSTSESTAALGCLVKDYFPEPVTVSWNSGALTSGVHTFPAVLQSSGLYSLSSVVTVPSSSLGTKTYTCNVDHKPSNTKVDKRVESKYGPPCPSCPAPEFLGGPSVFLFPPKPKDTLMISRTPEVTCVVVDVSQEDPEVQFNWYVDGVEVHNAKTKPREEQFNSTYRVVSVLTVLHQDWLNGKEYKCKVSNKGLPSSIEKTISKAKGQPREPQVYTLPPSQEEMTKNQVSLTCLVKGFYPSDIAVEWESNGQPENNYKTTPPVLDSDGSFFLYSRLTVDKSRWQEGNVFSCSVMHEALHNHYTQKSLSLSLGKGGGGSGGGGSGGGGSTIPPHVQKSVNNDMIVTDNNGAVKFPQLCKFCDVRFSTCDNQKSCMSNCSITSICEKPQEVCVAVWRKNDENITLETVCHDPKLPYHDFILEDAASPKCIMKEKKKPGETFFMCSCSSDECNDNIIFSEEYNTSNPD

SEQ ID NO: 589 - protein, 593 aa, Artificial Sequence
  Description of Artificial Sequence: Synthetic polypeptide
TIPPHVQKSVNNDMIVTDNNGAVKFPQLCKFCDVRFSTCDNQKSCMSNCSITSICEKPQEVCVAVWRKNDENITLETVCHDPKLPYHDFILEDAASPKCIMKEKKKPGETFFMCSCSSDECNDNIIFSEEYNTSNPDASTKGPSVFPLAPCSRSTSESTAALGCLVKDYFPEPVTVSWNSGALTSGVHTFPAVLQSSGLYSLSSVVTVPSSSLGTKTYTCNVDHKPSNTKVDKRVESKYGPPCPSCPAPEFLGGPSVFLFPPKPKDTLMISRTPEVTCVVVDVSQEDPEVQFNWYVDGVEVHNAKTKPREEQFNSTYRVVSVLTVLHQDWLNGKEYKCKVSNKGLPSSIEKTISKAKGQPREPQVYTLPPSQEEMTKNQVSLTCLVKGFYPSDIAVEWESNGQPENNYKTTPPVLDSDGSFFLYSRLTVDKSRWQEGNVFSCSVMHEALHNHYTQKSLSLSLGKGGGGSGGGGSGGGGSNWVNVISDLKKIEDLIQSMHIDATLYTESDVHPSCKVTAMKCFLLELQVISLESGDASIHDTVENLIILANNSLSSNGNVTESGCKECEELEEKNIKEFLQSFVHIVQMFINTS

SEQ ID NO: 590 - protein, 593 aa, Artificial Sequence
  Description of Artificial Sequence: Synthetic polypeptide
NWVNVISDLKKIEDLIQSMHIDATLYTESDVHPSCKVTAMKCFLLELQVISLESGDASIHDTVENLIILANNSLSSNGNVTESGCKECEELEEKNIKEFLQSFVHIVQMFINTSASTKGPSVFPLAPCSRSTSESTAALGCLVKDYFPEPVTVSWNSGALTSGVHTFPAVLQSSGLYSLSSVVTVPSSSLGTKTYTCNVDHKPSNTKVDKRVESKYGPPCPSCPAPEFLGGPSVFLFPPKPKDTLMISRTPEVTCVVVDVSQEDPEVQFNWYVDGVEVHNAKTKPREEQFNSTYRVVSVLTVLHQDWLNGKEYKCKVSNKGLPSSIEKTISKAKGQPREPQVYTLPPSQEEMTKNQVSLTCLVKGFYPSDIAVEWESNGQPENNYKTTPPVLDSDGSFFLYSRLTVDKSRWQEGNVFSCSVMHEALHNHYTQKSLSLSLGKGGGGSGGGGSGGGGSTIPPHVQKSVNNDMIVTDNNGAVKFPQLCKFCDVRFSTCDNQKSCMSNCSITSICEKPQEVCVAVWRKNDENITLETVCHDPKLPYHDFILEDAASPKCIMKEKKKPGETFFMCSCSSDECNDNIIFSEEYNTSNPD

SEQ ID NO: 591 - protein, 1041 aa, Artificial Sequence
  Description of Artificial Sequence: Synthetic polypeptide
SEVEYRAEVGQNAYLPCFYTPAAPGNLVPVCWGKGACPVFECGNVVLRTDERDVNYWTSRYWLNGDFRKGDVSLTIENVTLADSGIYCCRIQIPGIMNDEKFNLKLVIKPAKVTPAPTRQRDFTAAFPRMLTTRGHGPAETQTLGSLPDINLTQISTLANELRDSRLANDLRDSGATIRIGASTKGPSVFPLAPCSRSTSESTAALGCLVKDYFPEPVTVSWNSGALTSGVHTFPAVLQSSGLYSLSSVVTVPSSSLGTKTYTCNVDHKPSNTKVDKRVESKYGPPCPSCPAPEFLGGPSVFLFPPKPKDTLMISRTPEVTCVVVDVSQEDPEVQFNWYVDGVEVHNAKTKPREEQFNSTYRVVSVLTVLHQDWLNGKEYKCKVSNKGLPSSIEKTISKAKGQPREPQVYTLPPSQEEMTKNQVSLTCLVKGFYPSDIAVEWESNGQPENNYKTTPPVLDSDGSFFLYSRLTVDKSRWQEGNVFSCSVMHEALHNHYTQKSLSLSLGKGGGGSGGGGSGGGGSIWELKKDVYVVELDWYPDAPGEMVVLTCDTPEEDGITWTLDQSSEVLGSGKTLTIQVKEFGDAGQYTCHKGGEVLSHSLLLLHKKEDGIWSTDILKDQKEPKNKTFLRCEAKNYSGRFTCWWLTTISTDLTFSVKSSRGSSDPQGVTCGAATLSAERVRGDNKEYEYSVECQEDSACPAAEESLPIEVMVDAVHKLKYENYTSSFFIRDIIKPDPPKNLQLKPLKNSRQVEVSWEYPDTWSTPHSYFSLTFCVQVQGKSKREKKDRVFTDKTSATVICRKNASISVRAQDRYYSSSWSEWASVPCSGGGGSGGGGSGGGGSRNLPVATPDPGMFPCLHHSQNLLRAVSNMLQKARQTLEFYPCTSEEIDHEDITKDKTSTVEACLPLELTKNESCLNSRETSFITNGSCLASRKTSFMMALCLSSIYEDLKMYQVEFKTMNAKLLMDPKRQIFLDQNMLAVIDELMQALNFNSETVPQKSSLEEPDFYKTKIKLCILLHAFRIRAVTIDRVMSYLNAS

SEQ ID NO: 592 - protein, 1041 aa, Artificial Sequence
  Description of Artificial Sequence: Synthetic polypeptide
IWELKKDVYVVELDWYPDAPGEMVVLTCDTPEEDGITWTLDQSSEVLGSGKTLTIQVKEFGDAGQYTCHKGGEVLSHSLLLLHKKEDGIWSTDILKDQKEPKNKTFLRCEAKNYSGRFTCWWLTTISTDLTFSVKSSRGSSDPQGVTCGAATLSAERVRGDNKEYEYSVECQEDSACPAAEESLPIEVMVDAVHKLKYENYTSSFFIRDIIKPDPPKNLQLKPLKNSRQVEVSWEYPDTWSTPHSYFSLTFCVQVQGKSKREKKDRVFTDKTSATVICRKNASISVRAQDRYYSSSWSEWASVPCSGGGGSGGGGSGGGGSRNLPVATPDPGMFPCLHHSQNLLRAVSNMLQKARQTLEFYPCTSEEIDHEDITKDKTSTVEACLPLELTKNESCLNSRETSFITNGSCLASRKTSFMMALCLSSIYEDLKMYQVEFKTMNAKLLMDPKRQIFLDQNMLAVIDELMQALNFNSETVPQKSSLEEPDFYKTKIKLCILLHAFRIRAVTIDRVMSYLNASASTKGPSVFPLAPCSRSTSESTAALGCLVKDYFPEPVTVSWNSGALTSGVHTFPAVLQSSGLYSLSSVVTVPSSSLGTKTYTCNVDHKPSNTKVDKRVESKYGPPCPSCPAPEFLGGPSVFLFPPKPKDTLMISRTPEVTCVVVDVSQEDPEVQFNWYVDGVEVHNAKTKPREEQFNSTYRVVSVLTVLHQDWLNGKEYKCKVSNKGLPSSIEKTISKAKGQPREPQVYTLPPSQEEMTKNQVSLTCLVKGFYPSDIAVEWESNGQPENNYKTTPPVLDSDGSFFLYSRLTVDKSRWQEGNVFSCSVMHEALHNHYTQKSLSLSLGKGGGGSGGGGSGGGGSSEVEYRAEVGQNAYLPCFYTPAAPGNLVPVCWGKGACPVFECGNVVLRTDERDVNYWTSRYWLNGDFRKGDVSLTIENVTLADSGIYCCRIQIPGIMNDEKFNLKLVIKPAKVTPAPTRQRDFTAAFPRMLTTRGHGPAETQTLGSLPDINLTQISTLANELRDSRLANDLRDSGATIRIG

SEQ ID NO: 593 - protein, 637 aa, Artificial Sequence
  Description of Artificial Sequence: Synthetic polypeptide
SEVEYRAEVGQNAYLPCFYTPAAPGNLVPVCWGKGACPVFECGNVVLRTDERDVNYWTSRYWLNGDFRKGDVSLTIENVTLADSGIYCCRIQIPGIMNDEKFNLKLVIKPAKVTPAPTRQRDFTAAFPRMLTTRGHGPAETQTLGSLPDINLTQISTLANELRDSRLANDLRDSGATIRIGASTKGPSVFPLAPCSRSTSESTAALGCLVKDYFPEPVTVSWNSGALTSGVHTFPAVLQSSGLYSLSSVVTVPSSSLGTKTYTCNVDHKPSNTKVDKRVESKYGPPCPSCPAPEFLGGPSVFLFPPKPKDTLMISRTPEVTCVVVDVSQEDPEVQFNWYVDGVEVHNAKTKPREEQFNSTYRVVSVLTVLHQDWLNGKEYKCKVSNKGLPSSIEKTISKAKGQPREPQVYTLPPSQEEMTKNQVSLTCLVKGFYPSDIAVEWESNGQPENNYKTTPPVLDSDGSFFLYSRLTVDKSRWQEGNVFSCSVMHEALHNHYTQKSLSLSLGKGGGGSGGGGSGGGGSNWVNVISDLKKIEDLIQSMHIDATLYTESDVHPSCKVTAMKCFLLELQVISLESGDASIHDTVENLIILANNSLSSNGNVTESGCKECEELEEKNIKEFLQSFVHIVQMFINTS

SEQ ID NO: 594 - protein, 637 aa, Artificial Sequence
  Description of Artificial Sequence: Synthetic polypeptide
NWVNVISDLKKIEDLIQSMHIDATLYTESDVHPSCKVTAMKCFLLELQVISLESGDASIHDTVENLIILANNSLSSNGNVTESGCKECEELEEKNIKEFLQSFVHIVQMFINTSASTKGPSVFPLAPCSRSTSESTAALGCLVKDYFPEPVTVSWNSGALTSGVHTFPAVLQSSGLYSLSSVVTVPSSSLGTKTYTCNVDHKPSNTKVDKRVESKYGPPCPSCPAPEFLGGPSVFLFPPKPKDTLMISRTPEVTCVVVDVSQEDPEVQFNWYVDGVEVHNAKTKPREEQFNSTYRVVSVLTVLHQDWLNGKEYKCKVSNKGLPSSIEKTISKAKGQPREPQVYTLPPSQEEMTKNQVSLTCLVKGFYPSDIAVEWESNGQPENNYKTTPPVLDSDGSFFLYSRLTVDKSRWQEGNVFSCSVMHEALHNHYTQKSLSLSLGKGGGGSGGGGSGGGGSSEVEYRAEVGQNAYLPCFYTPAAPGNLVPVCWGKGACPVFECGNVVLRTDERDVNYWTSRYWLNGDFRKGDVSLTIENVTLADSGIYCCRIQIPGIMNDEKFNLKLVIKPAKVTPAPTRQRDFTAAFPRMLTTRGHGPAETQTLGSLPDINLTQISTLANELRDSRLANDLRDSGATIRIG

SEQ ID NO: 595 - protein, 1065 aa, Artificial Sequence
  Description of Artificial Sequence: Synthetic polypeptide
SDTGRPFVEMYSEIPEIIHMTEGRELVIPCRVTSPNITVTLKKFPLDTLIPDGKRIIWDSRKGFIISNATYKEIGLLTCEATVNGHLYKTNYLTHRQTNTIIDVVLSPSHGIELSVGEKLVLNCTARTELNVGIDFNWEYPSSKHQHKKLVNRDLKTQSGSEMKKFLSTLTIDGVTRSDQGLYTCAASSGLMTKKNSTFVRVHEKASTKGPSVFPLAPCSRSTSESTAALGCLVKDYFPEPVTVSWNSGALTSGVHTFPAVLQSSGLYSLSSVVTVPSSSLGTKTYTCNVDHKPSNTKVDKRVESKYGPPCPSCPAPEFLGGPSVFLFPPKPKDTLMISRTPEVTCVVVDVSQEDPEVQFNWYVDGVEVHNAKTKPREEQFNSTYRVVSVLTVLHQDWLNGKEYKCKVSNKGLPSSIEKTISKAKGQPREPQVYTLPPSQEEMTKNQVSLTCLVKGFYPSDIAVEWESNGQPENNYKTTPPVLDSDGSFFLYSRLTVDKSRWQEGNVFSCSVMHEALHNHYTQKSLSLSLGKGGGGSGGGGSGGGGSIWELKKDVYVVELDWYPDAPGEMVVLTCDTPEEDGITWTLDQSSEVLGSGKTLTIQVKEFGDAGQYTCHKGGEVLSHSLLLLHKKEDGIWSTDILKDQKEPKNKTFLRCEAKNYSGRFTCWWLTTISTDLTFSVKSSRGSSDPQGVTCGAATLSAERVRGDNKEYEYSVECQEDSACPAAEESLPIEVMVDAVHKLKYENYTSSFFIRDIIKPDPPKNLQLKPLKNSRQVEVSWEYPDTWSTPHSYFSLTFCVQVQGKSKREKKDRVFTDKTSATVICRKNASISVRAQDRYYSSSWSEWASVPCSGGGGSGGGGSGGGGSRNLPVATPDPGMFPCLHHSQNLLRAVSNMLQKARQTLEFYPCTSEEIDHEDITKDKTSTVEACLPLELTKNESCLNSRETSFITNGSCLASRKTSFMMALCLSSIYEDLKMYQVEFKTMNAKLLMDPKRQIFLDQNMLAVIDELMQALNFNSETVPQKSSLEEPDFYKTKIKLCILLHAFRIRAVTIDRVMSYLNAS

SEQ ID NO: 596 - protein, 1065 aa, Artificial Sequence
  Description of Artificial Sequence: Synthetic polypeptide
IWELKKDVYVVELDWYPDAPGEMVVLTCDTPEEDGITWTLDQSSEVLGSGKTLTIQVKEFGDAGQYTCHKGGEVLSHSLLLLHKKEDGIWSTDILKDQKEPKNKTFLRCEAKNYSGRFTCWWLTTISTDLTFSVKSSRGSSDPQGVTCGAATLSAERVRGDNKEYEYSVECQEDSACPAAEESLPIEVMVDAVHKLKYENYTSSFFIRDIIKPDPPKNLQLKPLKNSRQVEVSWEYPDTWSTPHSYFSLTFCVQVQGKSKREKKDRVFTDKTSATVICRKNASISVRAQDRYYSSSWSEWASVPCSGGGGSGGGGSGGGGSRNLPVATPDPGMFPCLHHSQNLLRAVSNMLQKARQTLEFYPCTSEEIDHEDITKDKTSTVEACLPLELTKNESCLNSRETSFITNGSCLASRKTSFMMALCLSSIYEDLKMYQVEFKTMNAKLLMDPKRQIFLDQNMLAVIDELMQALNFNSETVPQKSSLEEPDFYKTKIKLCILLHAFRIRAVTIDRVMSYLNASASTKGPSVFPLAPCSRSTSESTAALGCLVKDYFPEPVTVSWNSGALTSGVHTFPAVLQSSGLYSLSSVVTVPSSSLGTKTYTCNVDHKPSNTKVDKRVESKYGPPCPSCPAPEFLGGPSVFLFPPKPKDTLMISRTPEVTCVVVDVSQEDPEVQFNWYVDGVEVHNAKTKPREEQFNSTYRVVSVLTVLHQDWLNGKEYKCKVSNKGLPSSIEKTISKAKGQPREPQVYTLPPSQEEMTKNQVSLTCLVKGFYPSDIAVEWESNGQPENNYKTTPPVLDSDGSFFLYSRLTVDKSRWQEGNVFSCSVMHEALHNHYTQKSLSLSLGKGGGGSGGGGSGGGGSSDTGRPFVEMYSEIPEIIHMTEGRELVIPCRVTSPNITVTLKKFPLDTLIPDGKRIIWDSRKGFIISNATYKEIGLLTCEATVNGHLYKTNYLTHRQTNTIIDVVLSPSHGIELSVGEKLVLNCTARTELNVGIDFNWEYPSSKHQHKKLVNRDLKTQSGSEMKKFLSTLTIDGVTRSDQGLYTCAASSGLMTKKNSTFVRVHEK

SEQ ID NO: 597 - protein, 661 aa, Artificial Sequence
  Description of Artificial Sequence: Synthetic polypeptide
SDTGRPFVEMYSEIPEIIHMTEGRELVIPCRVTSPNITVTLKKFPLDTLIPDGKRIIWDSRKGFIISNATYKEIGLLTCEATVNGHLYKTNYLTHRQTNTIIDVVLSPSHGIELSVGEKLVLNCTARTELNVGIDFNWEYPSSKHQHKKLVNRDLKTQSGSEMKKFLSTLTIDGVTRSDQGLYTCAASSGLMTKKNSTFVRVHEKASTKGPSVFPLAPCSRSTSESTAALGCLVKDYFPEPVTVSWNSGALTSGVHTFPAVLQSSGLYSLSSVVTVPSSSLGTKTYTCNVDHKPSNTKVDKRVESKYGPPCPSCPAPEFLGGPSVFLFPPKPKDTLMISRTPEVTCVVVDVSQEDPEVQFNWYVDGVEVHNAKTKPREEQFNSTYRVVSVLTVLHQDWLNGKEYKCKVSNKGLPSSIEKTISKAKGQPREPQVYTLPPSQEEMTKNQVSLTCLVKGFYPSDIAVEWESNGQPENNYKTTPPVLDSDGSFFLYSRLTVDKSRWQEGNVFSCSVMHEALHNHYTQKSLSLSLGKGGGGSGGGGSGGGGSNWVNVISDLKKIEDLIQSMHIDATLYTESDVHPSCKVTAMKCFLLELQVISLESGDASIHDTVENLIILANNSLSSNGNVTESGCKECEELEEKNIKEFLQSFVHIVQMFINTS

SEQ ID NO: 598 - protein, 661 aa, Artificial Sequence
  Description of Artificial Sequence: Synthetic polypeptide
NWVNVISDLKKIEDLIQSMHIDATLYTESDVHPSCKVTAMKCFLLELQVISLESGDASIHDTVENLIILANNSLSSNGNVTESGCKECEELEEKNIKEFLQSFVHIVQMFINTSASTKGPSVFPLAPCSRSTSESTAALGCLVKDYFPEPVTVSWNSGALTSGVHTFPAVLQSSGLYSLSSVVTVPSSSLGTKTYTCNVDHKPSNTKVDKRVESKYGPPCPSCPAPEFLGGPSVFLFPPKPKDTLMISRTPEVTCVVVDVSQEDPEVQFNWYVDGVEVHNAKTKPREEQFNSTYRVVSVLTVLHQDWLNGKEYKCKVSNKGLPSSIEKTISKAKGQPREPQVYTLPPSQEEMTKNQVSLTCLVKGFYPSDIAVEWESNGQPENNYKTTPPVLDSDGSFFLYSRLTVDKSRWQEGNVFSCSVMHEALHNHYTQKSLSLSLGKGGGGSGGGGSGGGGSSDTGRPFVEMYSEIPEIIHMTEGRELVIPCRVTSPNITVTLKKFPLDTLIPDGKRIIWDSRKGFIISNATYKEIGLLTCEATVNGHLYKTNYLTHRQTNTIIDVVLSPSHGIELSVGEKLVLNCTARTELNVGIDFNWEYPSSKHQHKKLVNRDLKTQSGSEMKKFLSTLTIDGVTRSDQGLYTCAASSGLMTKKNSTFVRVHEK

SEQ ID NO: 599 - protein, 1077 aa, Artificial Sequence
  Description of Artificial Sequence: Synthetic polypeptide
MDGRFWIRVQESVMVPEGLCISVPCSFSYPRQDWTGSTPAYGYWFKAVTETTKGAPVATNHQSREVEMSTRGRFQLTGDPAKGNCSLVIRDAQMQDESQYFFRVERGSYVRYNFMNDGFFLKVTALTQKPDVYIPETLEPGQPVTVICVFNWAFEECPPPSFSWTGAALSSQGTKPTTSHFSVLSFTPRPQDHNTDLTCHVDFSRKGVSAQRTVRLRVAYAPRDLVISISRDNTPALEPQPQGNVPYLEAQKGQFLRLLCAADSQPPATLSWVLQNRVLSSSHPWGPRPLGLELPGVKAGDSGRYTCRAENRLGSQQRALDLSVQYPPENLRVMVSQANRTVLENLGNGTSLPVLEGQSLCLVCVTHSSPPARLSWTQRGQVLSPSQPSDPGVLELPRVQVEHEGEFTCHARHPLGSQHVSLSLSVHYSPKLLGPSCSWEAEGLHCSCSSQASPAPSLRWWLGEELLEGNSSQDSFEVTPSSAGPWANSSLSLHGGLSSGLRLRCEAWNVHGAQSGSILQLPDKKGLISTASTKGPSVFPLAPCSRSTSESTAALGCLVKDYFPEPVTVSWNSGALTSGVHTFPAVLQSSGLYSLSSVVTVPSSSLGTKTYTCNVDHKPSNTKVDKRVESKYGPPCPSCPAPEFLGGPSVFLFPPKPKDTLMISRTPEVTCVVVDVSQEDPEVQFNWYVDGVEVHNAKTKPREEQFNSTYRVVSVLTVLHQDWLNGKEYKCKVSNKGLPSSIEKTISKAKGQPREPQVYTLPPSQEEMTKNQVSLTCLVKGFYPSDIAVEWESNGQPENNYKTTPPVLDSDGSFFLYSRLTVDKSRWQEGNVFSCSVMHEALHNHYTQKSLSLSLGKGGGGSGGGGSGGGGSACPWAVSGARASPGSAASPRLREGPELSPDDPAGLLDLRQGMFAQLVAQNVLLIDGPLSWYSDPGLAGVSLTGGLSYKEDTKELVVAKAGVYYVFFQLELRRVVAGEGSGSVSLALHLQPLRSAAGAAALALTVDLPPASSEARNSAFGFQGRLLHLSAGQRLGVHLHTEARARHAWQLTQGATVLGLFRVTPEIPAGLPSPRSE

SEQ ID NO: 600 - protein, 1077 aa, Artificial Sequence
  Description of Artificial Sequence: Synthetic polypeptide
ACPWAVSGARASPGSAASPRLREGPELSPDDPAGLLDLRQGMFAQLVAQNVLLIDGPLSWYSDPGLAGVSLTGGLSYKEDTKELVVAKAGVYYVFFQLELRRVVAGEGSGSVSLALHLQPLRSAAGAAALALTVDLPPASSEARNSAFGFQGRLLHLSAGQRLGVHLHTEARARHAWQLTQGATVLGLFRVTPEIPAGLPSPRSEASTKGPSVFPLAPCSRSTSESTAALGCLVKDYFPEPVTVSWNSGALTSGVHTFPAVLQSSGLYSLSSVVTVPSSSLGTKTYTCNVDHKPSNTKVDKRVESKYGPPCPSCPAPEFLGGPSVFLFPPKPKDTLMISRTPEVTCVVVDVSQEDPEVQFNWYVDGVEVHNAKTKPREEQFNSTYRVVSVLTVLHQDWLNGKEYKCKVSNKGLPSSIEKTISKAKGQPREPQVYTLPPSQEEMTKNQVSLTCLVKGFYPSDIAVEWESNGQPENNYKTTPPVLDSDGSFFLYSRLTVDKSRWQEGNVFSCSVMHEALHNHYTQKSLSLSLGKGGGGSGGGGSGGGGSMDGRFWIRVQESVMVPEGLCISVPCSFSYPRQDWTGSTPAYGYWFKAVTETTKGAPVATNHQSREVEMSTRGRFQLTGDPAKGNCSLVIRDAQMQDESQYFFRVERGSYVRYNFMNDGFFLKVTALTQKPDVYIPETLEPGQPVTVICVFNWAFEECPPPSFSWTGAALSSQGTKPTTSHFSVLSFTPRPQDHNTDLTCHVDFSRKGVSAQRTVRLRVAYAPRDLVISISRDNTPALEPQPQGNVPYLEAQKGQFLRLLCAADSQPPATLSWVLQNRVLSSSHPWGPRPLGLELPGVKAGDSGRYTCRAENRLGSQQRALDLSVQYPPENLRVMVSQANRTVLENLGNGTSLPVLEGQSLCLVCVTHSSPPARLSWTQRGQVLSPSQPSDPGVLELPRVQVEHEGEFTCHARHPLGSQHVSLSLSVHYSPKLLGPSCSWEAEGLHCSCSSQASPAPSLRWWLGEELLEGNSSQDSFEVTPSSAGPWANSSLSLHGGLSSGLRLRCEAWNVHGAQSGSILQLPDKKGLIST

SEQ ID NO: 601 - protein, 1044 aa, Artificial Sequence
  Description of Artificial Sequence: Synthetic polypeptide
MDGRFWIRVQESVMVPEGLCISVPCSFSYPRQDWTGSTPAYGYWFKAVTETTKGAPVATNHQSREVEMSTRGRFQLTGDPAKGNCSLVIRDAQMQDESQYFFRVERGSYVRYNFMNDGFFLKVTALTQKPDVYIPETLEPGQPVTVICVFNWAFEECPPPSFSWTGAALSSQGTKPTTSHFSVLSFTPRPQDHNTDLTCHVDFSRKGVSAQRTVRLRVAYAPRDLVISISRDNTPALEPQPQGNVPYLEAQKGQFLRLLCAADSQPPATLSWVLQNRVLSSSHPWGPRPLGLELPGVKAGDSGRYTCRAENRLGSQQRALDLSVQYPPENLRVMVSQANRTVLENLGNGTSLPVLEGQSLCLVCVTHSSPPARLSWTQRGQVLSPSQPSDPGVLELPRVQVEHEGEFTCHARHPLGSQHVSLSLSVHYSPKLLGPSCSWEAEGLHCSCSSQASPAPSLRWWLGEELLEGNSSQDSFEVTPSSAGPWANSSLSLHGGLSSGLRLRCEAWNVHGAQSGSILQLPDKKGLISTASTKGPSVFPLAPCSRSTSESTAALGCLVKDYFPEPVTVSWNSGALTSGVHTFPAVLQSSGLYSLSSVVTVPSSSLGTKTYTCNVDHKPSNTKVDKRVESKYGPPCPSCPAPEFLGGPSVFLFPPKPKDTLMISRTPEVTCVVVDVSQEDPEVQFNWYVDGVEVHNAKTKPREEQFNSTYRVVSVLTVLHQDWLNGKEYKCKVSNKGLPSSIEKTISKAKGQPREPQVYTLPPSQEEMTKNQVSLTCLVKGFYPSDIAVEWESNGQPENNYKTTPPVLDSDGSFFLYSRLTVDKSRWQEGNVFSCSVMHEALHNHYTQKSLSLSLGKGGGGSGGGGSGGGGSQRTDSIPNSPDNVPLKGGNCSEDLLCILKRAPFKKSWAYLQVAKHLNKTKLSWNKDGILHGVRYQDGNLVIQFPGLYFIICQLQFLVQCPNNSVDLKLELLINKHIKKQALVTVCESGMQTKHVYQNLSQFLLDYLQVNTTISVNVDTFQYIDTSTFPLENVLSIFLYSNSD

SEQ ID NO: 602 - protein, 1044 aa, Artificial Sequence
  Description of Artificial Sequence: Synthetic polypeptide
QRTDSIPNSPDNVPLKGGNCSEDLLCILKRAPFKKSWAYLQVAKHLNKTKLSWNKDGILHGVRYQDGNLVIQFPGLYFIICQLQFLVQCPNNSVDLKLELLINKHIKKQALVTVCESGMQTKHVYQNLSQFLLDYLQVNTTISVNVDTFQYIDTSTFPLENVLSIFLYSNSDASTKGPSVFPLAPCSRSTSESTAALGCLVKDYFPEPVTVSWNSGALTSGVHTFPAVLQSSGLYSLSSVVTVPSSSLGTKTYTCNVDHKPSNTKVDKRVESKYGPPCPSCPAPEFLGGPSVFLFPPKPKDTLMISRTPEVTCVVVDVSQEDPEVQFNWYVDGVEVHNAKTKPREEQFNSTYRVVSVLTVLHQDWLNGKEYKCKVSNKGLPSSIEKTISKAKGQPREPQVYTLPPSQEEMTKNQVSLTCLVKGFYPSDIAVEWESNGQPENNYKTTPPVLDSDGSFFLYSRLTVDKSRWQEGNVFSCSVMHEALHNHYTQKSLSLSLGKGGGGSGGGGSGGGGSMDGRFWIRVQESVMVPEGLCISVPCSFSYPRQDWTGSTPAYGYWFKAVTETTKGAPVATNHQSREVEMSTRGRFQLTGDPAKGNCSLVIRDAQMQDESQYFFRVERGSYVRYNFMNDGFFLKVTALTQKPDVYIPETLEPGQPVTVICVFNWAFEECPPPSFSWTGAALSSQGTKPTTSHFSVLSFTPRPQDHNTDLTCHVDFSRKGVSAQRTVRLRVAYAPRDLVISISRDNTPALEPQPQGNVPYLEAQKGQFLRLLCAADSQPPATLSWVLQNRVLSSSHPWGPRPLGLELPGVKAGDSGRYTCRAENRLGSQQRALDLSVQYPPENLRVMVSQANRTVLENLGNGTSLPVLEGQSLCLVCVTHSSPPARLSWTQRGQVLSPSQPSDPGVLELPRVQVEHEGEFTCHARHPLGSQHVSLSLSVHYSPKLLGPSCSWEAEGLHCSCSSQASPAPSLRWWLGEELLEGNSSQDSFEVTPSSAGPWANSSLSLHGGLSSGLRLRCEAWNVHGAQSGSILQLPDKKGLIST

SEQ ID NO: 603 - protein, 1018 aa, Artificial Sequence
  Description of Artificial Sequence: Synthetic polypeptide
MDGRFWIRVQESVMVPEGLCISVPCSFSYPRQDWTGSTPAYGYWFKAVTETTKGAPVATNHQSREVEMSTRGRFQLTGDPAKGNCSLVIRDAQMQDESQYFFRVERGSYVRYNFMNDGFFLKVTALTQKPDVYIPETLEPGQPVTVICVFNWAFEECPPPSFSWTGAALSSQGTKPTTSHFSVLSFTPRPQDHNTDLTCHVDFSRKGVSAQRTVRLRVAYAPRDLVISISRDNTPALEPQPQGNVPYLEAQKGQFLRLLCAADSQPPATLSWVLQNRVLSSSHPWGPRPLGLELPGVKAGDSGRYTCRAENRLGSQQRALDLSVQYPPENLRVMVSQANRTVLENLGNGTSLPVLEGQSLCLVCVTHSSPPARLSWTQRGQVLSPSQPSDPGVLELPRVQVEHEGEFTCHARHPLGSQHVSLSLSVHYSPKLLGPSCSWEAEGLHCSCSSQASPAPSLRWWLGEELLEGNSSQDSFEVTPSSAGPWANSSLSLHGGLSSGLRLRCEAWNVHGAQSGSILQLPDKKGLISTASTKGPSVFPLAPCSRSTSESTAALGCLVKDYFPEPVTVSWNSGALTSGVHTFPAVLQSSGLYSLSSVVTVPSSSLGTKTYTCNVDHKPSNTKVDKRVESKYGPPCPSCPAPEFLGGPSVFLFPPKPKDTLMISRTPEVTCVVVDVSQEDPEVQFNWYVDGVEVHNAKTKPREEQFNSTYRVVSVLTVLHQDWLNGKEYKCKVSNKGLPSSIEKTISKAKGQPREPQVYTLPPSQEEMTKNQVSLTCLVKGFYPSDIAVEWESNGQPENNYKTTPPVLDSDGSFFLYSRLTVDKSRWQEGNVFSCSVMHEALHNHYTQKSLSLSLGKGGGGSGGGGSGGGGSGDQNPQIAAHVISEASSKTTSVLQWAEKGYYTMSNNLVTLENGKQLTVKRQGLYYIYAQVTFCSNREASSQAPFIASLCLKSPGRFERILLRAANTHSSAKPCGQQSIHLGGVFELQPGASVFVNVTDPSQVSHGTGFTSFGLLKL

SEQ ID NO: 604 - protein, 1018 aa, Artificial Sequence
  Description of Artificial Sequence: Synthetic polypeptide
GDQNPQIAAHVISEASSKTTSVLQWAEKGYYTMSNNLVTLENGKQLTVKRQGLYYIYAQVTFCSNREASSQAPFIASLCLKSPGRFERILLRAANTHSSAKPCGQQSIHLGGVFELQPGASVFVNVTDPSQVSHGTGFTSFGLLKLASTKGPSVFPLAPCSRSTSESTAALGCLVKDYFPEPVTVSWNSGALTSGVHTFPAVLQSSGLYSLSSVVTVPSSSLGTKTYTCNVDHKPSNTKVDKRVESKYGPPCPSCPAPEFLGGPSVFLFPPKPKDTLMISRTPEVTCVVVDVSQEDPEVQFNWYVDGVEVHNAKTKPREEQFNSTYRVVSVLTVLHQDWLNGKEYKCKVSNKGLPSSIEKTISKAKGQPREPQVYTLPPSQEEMTKNQVSLTCLVKGFYPSDIAVEWESNGQPENNYKTTPPVLDSDGSFFLYSRLTVDKSRWQEGNVFSCSVMHEALHNHYTQKSLSLSLGKGGGGSGGGGSGGGGSMDGRFWIRVQESVMVPEGLCISVPCSFSYPRQDWTGSTPAYGYWFKAVTETTKGAPVATNHQSREVEMSTRGRFQLTGDPAKGNCSLVIRDAQMQDESQYFFRVERGSYVRYNFMNDGFFLKVTALTQKPDVYIPETLEPGQPVTVICVFNWAFEECPPPSFSWTGAALSSQGTKPTTSHFSVLSFTPRPQDHNTDLTCHVDFSRKGVSAQRTVRLRVAYAPRDLVISISRDNTPALEPQPQGNVPYLEAQKGQFLRLLCAADSQPPATLSWVLQNRVLSSSHPWGPRPLGLELPGVKAGDSGRYTCRAENRLGSQQRALDLSVQYPPENLRVMVSQANRTVLENLGNGTSLPVLEGQSLCLVCVTHSSPPARLSWTQRGQVLSPSQPSDPGVLELPRVQVEHEGEFTCHARHPLGSQHVSLSLSVHYSPKLLGPSCSWEAEGLHCSCSSQASPAPSLRWWLGEELLEGNSSQDSFEVTPSSAGPWANSSLSLHGGLSSGLRLRCEAWNVHGAQSGSILQLPDKKGLIST

SEQ ID NO: 605 - protein, 1027 aa, Artificial Sequence
  Description of Artificial Sequence: Synthetic polypeptide
MDGRFWIRVQESVMVPEGLCISVPCSFSYPRQDWTGSTPAYGYWFKAVTETTKGAPVATNHQSREVEMSTRGRFQLTGDPAKGNCSLVIRDAQMQDESQYFFRVERGSYVRYNFMNDGFFLKVTALTQKPDVYIPETLEPGQPVTVICVFNWAFEECPPPSFSWTGAALSSQGTKPTTSHFSVLSFTPRPQDHNTDLTCHVDFSRKGVSAQRTVRLRVAYAPRDLVISISRDNTPALEPQPQGNVPYLEAQKGQFLRLLCAADSQPPATLSWVLQNRVLSSSHPWGPRPLGLELPGVKAGDSGRYTCRAENRLGSQQRALDLSVQYPPENLRVMVSQANRTVLENLGNGTSLPVLEGQSLCLVCVTHSSPPARLSWTQRGQVLSPSQPSDPGVLELPRVQVEHEGEFTCHARHPLGSQHVSLSLSVHYSPKLLGPSCSWEAEGLHCSCSSQASPAPSLRWWLGEELLEGNSSQDSFEVTPSSAGPWANSSLSLHGGLSSGLRLRCEAWNVHGAQSGSILQLPDKKGLISTASTKGPSVFPLAPCSRSTSESTAALGCLVKDYFPEPVTVSWNSGALTSGVHTFPAVLQSSGLYSLSSVVTVPSSSLGTKTYTCNVDHKPSNTKVDKRVESKYGPPCPSCPAPEFLGGPSVFLFPPKPKDTLMISRTPEVTCVVVDVSQEDPEVQFNWYVDGVEVHNAKTKPREEQFNSTYRVVSVLTVLHQDWLNGKEYKCKVSNKGLPSSIEKTISKAKGQPREPQVYTLPPSQEEMTKNQVSLTCLVKGFYPSDIAVEWESNGQPENNYKTTPPVLDSDGSFFLYSRLTVDKSRWQEGNVFSCSVMHEALHNHYTQKSLSLSLGKGGGGSGGGGSGGGGSQRFAQAQQQLPLESLGWDVAELQLNHTGPQQDPRLYWQGGPALGRSFLHGPELDKGQLRIHRDGIYMVHIQVTLAICSSTTASRHHPTTLAVGICSPASRSISLLRLSFHQGCTIASQRLTPLARGDTLCTNLTGTLLPSRNTDETFFGVQWVRP

SEQ ID NO: 606 - protein, 1027 aa, Artificial Sequence
  Description of Artificial Sequence: Synthetic polypeptide
QRFAQAQQQLPLESLGWDVAELQLNHTGPQQDPRLYWQGGPALGRSFLHGPELDKGQLRIHRDGIYMVHIQVTLAICSSTTASRHHPTTLAVGICSPASRSISLLRLSFHQGCTIASQRLTPLARGDTLCTNLTGTLLPSRNTDETFFGVQWVRPASTKGPSVFPLAPCSRSTSESTAALGCLVKDYFPEPVTVSWNSGALTSGVHTFPAVLQSSGLYSLSSVVTVPSSSLGTKTYTCNVDHKPSNTKVDKRVESKYGPPCPSCPAPEFLGGPSVFLFPPKPKDTLMISRTPEVTCVVVDVSQEDPEVQFNWYVDGVEVHNAKTKPREEQFNSTYRVVSVLTVLHQDWLNGKEYKCKVSNKGLPSSIEKTISKAKGQPREPQVYTLPPSQEEMTKNQVSLTCLVKGFYPSDIAVEWESNGQPENNYKTTPPVLDSDGSFFLYSRLTVDKSRWQEGNVFSCSVMHEALHNHYTQKSLSLSLGKGGGGSGGGGSGGGGSMDGRFWIRVQESVMVPEGLCISVPCSFSYPRQDWTGSTPAYGYWFKAVTETTKGAPVATNHQSREVEMSTRGRFQLTGDPAKGNCSLVIRDAQMQDESQYFFRVERGSYVRYNFMNDGFFLKVTALTQKPDVYIPETLEPGQPVTVICVFNWAFEECPPPSFSWTGAALSSQGTKPTTSHFSVLSFTPRPQDHNTDLTCHVDFSRKGVSAQRTVRLRVAYAPRDLVISISRDNTPALEPQPQGNVPYLEAQKGQFLRLLCAADSQPPATLSWVLQNRVLSSSHPWGPRPLGLELPGVKAGDSGRYTCRAENRLGSQQRALDLSVQYPPENLRVMVSQANRTVLENLGNGTSLPVLEGQSLCLVCVTHSSPPARLSWTQRGQVLSPSQPSDPGVLELPRVQVEHEGEFTCHARHPLGSQHVSLSLSVHYSPKLLGPSCSWEAEGLHCSCSSQASPAPSLRWWLGEELLEGNSSQDSFEVTPSSAGPWANSSLSLHGGLSSGLRLRCEAWNVHGAQSGSILQLPDKKGLIST

SEQ ID NO: 607 - protein, 1000 aa, Artificial Sequence
  Description of Artificial Sequence: Synthetic polypeptide
MDGRFWIRVQESVMVPEGLCISVPCSFSYPRQDWTGSTPAYGYWFKAVTETTKGAPVATNHQSREVEMSTRGRFQLTGDPAKGNCSLVIRDAQMQDESQYFFRVERGSYVRYNFMNDGFFLKVTALTQKPDVYIPETLEPGQPVTVICVFNWAFEECPPPSFSWTGAALSSQGTKPTTSHFSVLSFTPRPQDHNTDLTCHVDFSRKGVSAQRTVRLRVAYAPRDLVISISRDNTPALEPQPQGNVPYLEAQKGQFLRLLCAADSQPPATLSWVLQNRVLSSSHPWGPRPLGLELPGVKAGDSGRYTCRAENRLGSQQRALDLSVQYPPENLRVMVSQANRTVLENLGNGTSLPVLEGQSLCLVCVTHSSPPARLSWTQRGQVLSPSQPSDPGVLELPRVQVEHEGEFTCHARHPLGSQHVSLSLSVHYSPKLLGPSCSWEAEGLHCSCSSQASPAPSLRWWLGEELLEGNSSQDSFEVTPSSAGPWANSSLSLHGGLSSGLRLRCEAWNVHGAQSGSILQLPDKKGLISTASTKGPSVFPLAPCSRSTSESTAALGCLVKDYFPEPVTVSWNSGALTSGVHTFPAVLQSSGLYSLSSVVTVPSSSLGTKTYTCNVDHKPSNTKVDKRVESKYGPPCPSCPAPEFLGGPSVFLFPPKPKDTLMISRTPEVTCVVVDVSQEDPEVQFNWYVDGVEVHNAKTKPREEQFNSTYRVVSVLTVLHQDWLNGKEYKCKVSNKGLPSSIEKTISKAKGQPREPQVYTLPPSQEEMTKNQVSLTCLVKGFYPSDIAVEWESNGQPENNYKTTPPVLDSDGSFFLYSRLTVDKSRWQEGNVFSCSVMHEALHNHYTQKSLSLSLGKGGGGSGGGGSGGGGSQLETAKEPCMAKFGPLPSKWQMASSEPPCVNKVSDWKLEILQNGLYLIYGQVAPNANYNDVAPFEVRLYKNKDMIQTLTNKSKIQNVGGTYELHVGDTIDLIFNSEHQVLKNNTYWGIILLANPQFIS

SEQ ID NO: 608 - protein, 1000 aa, Artificial Sequence
  Description of Artificial Sequence: Synthetic polypeptide
QLETAKEPCMAKFGPLPSKWQMASSEPPCVNKVSDWKLEILQNGLYLIYGQVAPNANYNDVAPFEVRLYKNKDMIQTLTNKSKIQNVGGTYELHVGDTIDLIFNSEHQVLKNNTYWGIILLANPQFISASTKGPSVFPLAPCSRSTSESTAALGCLVKDYFPEPVTVSWNSGALTSGVHTFPAVLQSSGLYSLSSVVTVPSSSLGTKTYTCNVDHKPSNTKVDKRVESKYGPPCPSCPAPEFLGGPSVFLFPPKPKDTLMISRTPEVTCVVVDVSQEDPEVQFNWYVDGVEVHNAKTKPREEQFNSTYRVVSVLTVLHQDWLNGKEYKCKVSNKGLPSSIEKTISKAKGQPREPQVYTLPPSQEEMTKNQVSLTCLVKGFYPSDIAVEWESNGQPENNYKTTPPVLDSDGSFFLYSRLTVDKSRWQEGNVFSCSVMHEALHNHYTQKSLSLSLGKGGGGSGGGGSGGGGSMDGRFWIRVQESVMVPEGLCISVPCSFSYPRQDWTGSTPAYGYWFKAVTETTKGAPVATNHQSREVEMSTRGRFQLTGDPAKGNCSLVIRDAQMQDESQYFFRVERGSYVRYNFMNDGFFLKVTALTQKPDVYIPETLEPGQPVTVICVFNWAFEECPPPSFSWTGAALSSQGTKPTTSHFSVLSFTPRPQDHNTDLTCHVDFSRKGVSAQRTVRLRVAYAPRDLVISISRDNTPALEPQPQGNVPYLEAQKGQFLRLLCAADSQPPATLSWVLQNRVLSSSHPWGPRPLGLELPGVKAGDSGRYTCRAENRLGSQQRALDLSVQYPPENLRVMVSQANRTVLENLGNGTSLPVLEGQSLCLVCVTHSSPPARLSWTQRGQVLSPSQPSDPGVLELPRVQVEHEGEFTCHARHPLGSQHVSLSLSVHYSPKLLGPSCSWEAEGLHCSCSSQASPAPSLRWWLGEELLEGNSSQDSFEVTPSSAGPWANSSLSLHGGLSSGLRLRCEAWNVHGAQSGSILQLPDKKGLIST

SEQ ID NO: 609 - protein, 1112 aa, Artificial Sequence
  Description of Artificial Sequence: Synthetic polypeptide
MDGRFWIRVQESVMVPEGLCISVPCSFSYPRQDWTGSTPAYGYWFKAVTETTKGAPVATNHQSREVEMSTRGRFQLTGDPAKGNCSLVIRDAQMQDESQYFFRVERGSYVRYNFMNDGFFLKVTALTQKPDVYIPETLEPGQPVTVICVFNWAFEECPPPSFSWTGAALSSQGTKPTTSHFSVLSFTPRPQDHNTDLTCHVDFSRKGVSAQRTVRLRVAYAPRDLVISISRDNTPALEPQPQGNVPYLEAQKGQFLRLLCAADSQPPATLSWVLQNRVLSSSHPWGPRPLGLELPGVKAGDSGRYTCRAENRLGSQQRALDLSVQYPPENLRVMVSQANRTVLENLGNGTSLPVLEGQSLCLVCVTHSSPPARLSWTQRGQVLSPSQPSDPGVLELPRVQVEHEGEFTCHARHPLGSQHVSLSLSVHYSPKLLGPSCSWEAEGLHCSCSSQASPAPSLRWWLGEELLEGNSSQDSFEVTPSSAGPWANSSLSLHGGLSSGLRLRCEAWNVHGAQSGSILQLPDKKGLISTASTKGPSVFPLAPCSRSTSESTAALGCLVKDYFPEPVTVSWNSGALTSGVHTFPAVLQSSGLYSLSSVVTVPSSSLGTKTYTCNVDHKPSNTKVDKRVESKYGPPCPSCPAPEFLGGPSVFLFPPKPKDTLMISRTPEVTCVVVDVSQEDPEVQFNWYVDGVEVHNAKTKPREEQFNSTYRVVSVLTVLHQDWLNGKEYKCKVSNKGLPSSIEKTISKAKGQPREPQVYTLPPSQEEMTKNQVSLTCLVKGFYPSDIAVEWESNGQPENNYKTTPPVLDSDGSFFLYSRLTVDKSRWQEGNVFSCSVMHEALHNHYTQKSLSLSLGKGGGGSGGGGSGGGGSDTQEKEVRAMVGSDVELSCACPEGSRFDLNDVYVYWQTSESKTVVTYHIPQNSSLENVDSRYRNRALMSPAGMLRGDFSLRLFNVTPQDEQKFHCLVLSQSLGFQEVLSVEVTLHVAANFSVPVVSAPHSPSQDELTFTCTSINGYPRPNVYWINKTDNSLLDQALQNDTVFLNMRGLYDVVSVLRIARTPSVNIGCCIENVLLQQNLTVGSQTGNDIGERDKITENPVSTGEKNAATWS

SEQ ID NO: 610 - protein, 1112 aa, Artificial Sequence
  Description of Artificial Sequence: Synthetic polypeptide
DTQEKEVRAMVGSDVELSCACPEGSRFDLNDVYVYWQTSESKTVVTYHIPQNSSLENVDSRYRNRALMSPAGMLRGDFSLRLFNVTPQDEQKFHCLVLSQSLGFQEVLSVEVTLHVAANFSVPVVSAPHSPSQDELTFTCTSINGYPRPNVYWINKTDNSLLDQALQNDTVFLNMRGLYDVVSVLRIARTPSVNIGCCIENVLLQQNLTVGSQTGNDIGERDKITENPVSTGEKNAATWSASTKGPSVFPLAPCSRSTSESTAALGCLVKDYFPEPVTVSWNSGALTSGVHTFPAVLQSSGLYSLSSVVTVPSSSLGTKTYTCNVDHKPSNTKVDKRVESKYGPPCPSCPAPEFLGGPSVFLFPPKPKDTLMISRTPEVTCVVVDVSQEDPEVQFNWYVDGVEVHNAKTKPREEQFNSTYRVVSVLTVLHQDWLNGKEYKCKVSNKGLPSSIEKTISKAKGQPREPQVYTLPPSQEEMTKNQVSLTCLVKGFYPSDIAVEWESNGQPENNYKTTPPVLDSDGSFFLYSRLTVDKSRWQEGNVFSCSVMHEALHNHYTQKSLSLSLGKGGGGSGGGGSGGGGSMDGRFWIRVQESVMVPEGLCISVPCSFSYPRQDWTGSTPAYGYWFKAVTETTKGAPVATNHQSREVEMSTRGRFQLTGDPAKGNCSLVIRDAQMQDESQYFFRVERGSYVRYNFMNDGFFLKVTALTQKPDVYIPETLEPGQPVTVICVFNWAFEECPPPSFSWTGAALSSQGTKPTTSHFSVLSFTPRPQDHNTDLTCHVDFSRKGVSAQRTVRLRVAYAPRDLVISISRDNTPALEPQPQGNVPYLEAQKGQFLRLLCAADSQPPATLSWVLQNRVLSSSHPWGPRPLGLELPGVKAGDSGRYTCRAENRLGSQQRALDLSVQYPPENLRVMVSQANRTVLENLGNGTSLPVLEGQSLCLVCVTHSSPPARLSWTQRGQVLSPSQPSDPGVLELPRVQVEHEGEFTCHARHPLGSQHVSLSLSVHYSPKLLGPSCSWEAEGLHCSCSSQASPAPSLRWWLGEELLEGNSSQDSFEVTPSSAGPWANSSLSLHGGLSSGLRLRCEAWNVHGAQSGSILQLPDKKGLIST

SEQ ID NO: 611 - protein, 1039 aa, Artificial Sequence
  Description of Artificial Sequence: Synthetic polypeptide
MDGRFWIRVQESVMVPEGLCISVPCSFSYPRQDWTGSTPAYGYWFKAVTETTKGAPVATNHQSREVEMSTRGRFQLTGDPAKGNCSLVIRDAQMQDESQYFFRVERGSYVRYNFMNDGFFLKVTALTQKPDVYIPETLEPGQPVTVICVFNWAFEECPPPSFSWTGAALSSQGTKPTTSHFSVLSFTPRPQDHNTDLTCHVDFSRKGVSAQRTVRLRVAYAPRDLVISISRDNTPALEPQPQGNVPYLEAQKGQFLRLLCAADSQPPATLSWVLQNRVLSSSHPWGPRPLGLELPGVKAGDSGRYTCRAENRLGSQQRALDLSVQYPPENLRVMVSQANRTVLENLGNGTSLPVLEGQSLCLVCVTHSSPPARLSWTQRGQVLSPSQPSDPGVLELPRVQVEHEGEFTCHARHPLGSQHVSLSLSVHYSPKLLGPSCSWEAEGLHCSCSSQASPAPSLRWWLGEELLEGNSSQDSFEVTPSSAGPWANSSLSLHGGLSSGLRLRCEAWNVHGAQSGSILQLPDKKGLISTASTKGPSVFPLAPCSRSTSESTAALGCLVKDYFPEPVTVSWNSGALTSGVHTFPAVLQSSGLYSLSSVVTVPSSSLGTKTYTCNVDHKPSNTKVDKRVESKYGPPCPSCPAPEFLGGPSVFLFPPKPKDTLMISRTPEVTCVVVDVSQEDPEVQFNWYVDGVEVHNAKTKPREEQFNSTYRVVSVLTVLHQDWLNGKEYKCKVSNKGLPSSIEKTISKAKGQPREPQVYTLPPSQEEMTKNQVSLTCLVKGFYPSDIAVEWESNGQPENNYKTTPPVLDSDGSFFLYSRLTVDKSRWQEGNVFSCSVMHEALHNHYTQKSLSLSLGKGGGGSGGGGSGGGGSDGPAGSWEQLIQERRSHEVNPAAHLTGANSSLTGSGGPLLWETQLGLAFLRGLSYHDGALVVTKAGYYYIYSKVQLGGVGCPLGLASTITHGLYKRTPRYPEELELLVSQQSPCGRATSSSRVWWDSSFLGGVVHLEAGEKVVVRVLDERLVRLRDGTRSYFGAFMV

SEQ ID NO: 612 - protein, 1039 aa, Artificial Sequence
  Description of Artificial Sequence: Synthetic polypeptide
DGPAGSWEQLIQERRSHEVNPAAHLTGANSSLTGSGGPLLWETQLGLAFLRGLSYHDGALVVTKAGYYYIYSKVQLGGVGCPLGLASTITHGLYKRTPRYPEELELLVSQQSPCGRATSSSRVWWDSSFLGGVVHLEAGEKVVVRVLDERLVRLRDGTRSYFGAFMVASTKGPSVFPLAPCSRSTSESTAALGCLVKDYFPEPVTVSWNSGALTSGVHTFPAVLQSSGLYSLSSVVTVPSSSLGTKTYTCNVDHKPSNTKVDKRVESKYGPPCPSCPAPEFLGGPSVFLFPPKPKDTLMISRTPEVTCVVVDVSQEDPEVQFNWYVDGVEVHNAKTKPREEQFNSTYRVVSVLTVLHQDWLNGKEYKCKVSNKGLPSSIEKTISKAKGQPREPQVYTLPPSQEEMTKNQVSLTCLVKGFYPSDIAVEWESNGQPENNYKTTPPVLDSDGSFFLYSRLTVDKSRWQEGNVFSCSVMHEALHNHYTQKSLSLSLGKGGGGSGGGGSGGGGSMDGRFWIRVQESVMVPEGLCISVPCSFSYPRQDWTGSTPAYGYWFKAVTETTKGAPVATNHQSREVEMSTRGRFQLTGDPAKGNCSLVIRDAQMQDESQYFFRVERGSYVRYNFMNDGFFLKVTALTQKPDVYIPETLEPGQPVTVICVFNWAFEECPPPSFSWTGAALSSQGTKPTTSHFSVLSFTPRPQDHNTDLTCHVDFSRKGVSAQRTVRLRVAYAPRDLVISISRDNTPALEPQPQGNVPYLEAQKGQFLRLLCAADSQPPATLSWVLQNRVLSSSHPWGPRPLGLELPGVKAGDSGRYTCRAENRLGSQQRALDLSVQYPPENLRVMVSQANRTVLENLGNGTSLPVLEGQSLCLVCVTHSSPPARLSWTQRGQVLSPSQPSDPGVLELPRVQVEHEGEFTCHARHPLGSQHVSLSLSVHYSPKLLGPSCSWEAEGLHCSCSSQASPAPSLRWWLGEELLEGNSSQDSFEVTPSSAGPWANSSLSLHGGLSSGLRLRCEAWNVHGAQSGSILQLPDKKGLIST

SEQ ID NO: 613 - protein, 1005 aa, Artificial Sequence
  Description of Artificial Sequence: Synthetic polypeptide
MDGRFWIRVQESVMVPEGLCISVPCSFSYPRQDWTGSTPAYGYWFKAVTETTKGAPVATNHQSREVEMSTRGRFQLTGDPAKGNCSLVIRDAQMQDESQYFFRVERGSYVRYNFMNDGFFLKVTALTQKPDVYIPETLEPGQPVTVICVFNWAFEECPPPSFSWTGAALSSQGTKPTTSHFSVLSFTPRPQDHNTDLTCHVDFSRKGVSAQRTVRLRVAYAPRDLVISISRDNTPALEPQPQGNVPYLEAQKGQFLRLLCAADSQPPATLSWVLQNRVLSSSHPWGPRPLGLELPGVKAGDSGRYTCRAENRLGSQQRALDLSVQYPPENLRVMVSQANRTVLENLGNGTSLPVLEGQSLCLVCVTHSSPPARLSWTQRGQVLSPSQPSDPGVLELPRVQVEHEGEFTCHARHPLGSQHVSLSLSVHYSPKLLGPSCSWEAEGLHCSCSSQASPAPSLRWWLGEELLEGNSSQDSFEVTPSSAGPWANSSLSLHGGLSSGLRLRCEAWNVHGAQSGSILQLPDKKGLISTASTKGPSVFPLAPCSRSTSESTAALGCLVKDYFPEPVTVSWNSGALTSGVHTFPAVLQSSGLYSLSSVVTVPSSSLGTKTYTCNVDHKPSNTKVDKRVESKYGPPCPSCPAPEFLGGPSVFLFPPKPKDTLMISRTPEVTCVVVDVSQEDPEVQFNWYVDGVEVHNAKTKPREEQFNSTYRVVSVLTVLHQDWLNGKEYKCKVSNKGLPSSIEKTISKAKGQPREPQVYTLPPSQEEMTKNQVSLTCLVKGFYPSDIAVEWESNGQPENNYKTTPPVLDSDGSFFLYSRLTVDKSRWQEGNVFSCSVMHEALHNHYTQKSLSLSLGKGGGGSGGGGSGGGGSQVSHRYPRIQSIKVQFTEYKKEKGFILTSQKEDEIMKVQNNSVIINCDGFYLISLKGYFSQEVNISLHYQKDEEPLFQLKKVRSVNSLMVASLTYKDKVYLNVTTDNTSLDDFHVNGGELILIHQNPGEFCVL

SEQ ID NO: 614 - protein, 1005 aa, Artificial Sequence
  Description of Artificial Sequence: Synthetic polypeptide
QVSHRYPRIQSIKVQFTEYKKEKGFILTSQKEDEIMKVQNNSVIINCDGFYLISLKGYFSQEVNISLHYQKDEEPLFQLKKVRSVNSLMVASLTYKDKVYLNVTTDNTSLDDFHVNGGELILIHQNPGEFCVLASTKGPSVFPLAPCSRSTSESTAALGCLVKDYFPEPVTVSWNSGALTSGVHTFPAVLQSSGLYSLSSVVTVPSSSLGTKTYTCNVDHKPSNTKVDKRVESKYGPPCPSCPAPEFLGGPSVFLFPPKPKDTLMISRTPEVTCVVVDVSQEDPEVQFNWYVDGVEVHNAKTKPREEQFNSTYRVVSVLTVLHQDWLNGKEYKCKVSNKGLPSSIEKTISKAKGQPREPQVYTLPPSQEEMTKNQVSLTCLVKGFYPSDIAVEWESNGQPENNYKTTPPVLDSDGSFFLYSRLTVDKSRWQEGNVFSCSVMHEALHNHYTQKSLSLSLGKGGGGSGGGGSGGGGSMDGRFWIRVQESVMVPEGLCISVPCSFSYPRQDWTGSTPAYGYWFKAVTETTKGAPVATNHQSREVEMSTRGRFQLTGDPAKGNCSLVIRDAQMQDESQYFFRVERGSYVRYNFMNDGFFLKVTALTQKPDVYIPETLEPGQPVTVICVFNWAFEECPPPSFSWTGAALSSQGTKPTTSHFSVLSFTPRPQDHNTDLTCHVDFSRKGVSAQRTVRLRVAYAPRDLVISISRDNTPALEPQPQGNVPYLEAQKGQFLRLLCAADSQPPATLSWVLQNRVLSSSHPWGPRPLGLELPGVKAGDSGRYTCRAENRLGSQQRALDLSVQYPPENLRVMVSQANRTVLENLGNGTSLPVLEGQSLCLVCVTHSSPPARLSWTQRGQVLSPSQPSDPGVLELPRVQVEHEGEFTCHARHPLGSQHVSLSLSVHYSPKLLGPSCSWEAEGLHCSCSSQASPAPSLRWWLGEELLEGNSSQDSFEVTPSSAGPWANSSLSLHGGLSSGLRLRCEAWNVHGAQSGSILQLPDKKGLIST

SEQ ID NO: 615 - protein, 684 aa, Artificial Sequence
  Description of Artificial Sequence: Synthetic polypeptide
TIPPHVQKSVNNDMIVTDNNGAVKFPQLCKFCDVRFSTCDNQKSCMSNCSITSICEKPQEVCVAVWRKNDENITLETVCHDPKLPYHDFILEDAASPKCIMKEKKKPGETFFMCSCSSDECNDNIIFSEEYNTSNPDASTKGPSVFPLAPCSRSTSESTAALGCLVKDYFPEPVTVSWNSGALTSGVHTFPAVLQSSGLYSLSSVVTVPSSSLGTKTYTCNVDHKPSNTKVDKRVESKYGPPCPSCPAPEFLGGPSVFLFPPKPKDTLMISRTPEVTCVVVDVSQEDPEVQFNWYVDGVEVHNAKTKPREEQFNSTYRVVSVLTVLHQDWLNGKEYKCKVSNKGLPSSIEKTISKAKGQPREPQVYTLPPSQEEMTKNQVSLTCLVKGFYPSDIAVEWESNGQPENNYKTTPPVLDSDGSFFLYSRLTVDKSRWQEGNVFSCSVMHEALHNHYTQKSLSLSLGKGGGGSGGGGSGGGGSACPWAVSGARASPGSAASPRLREGPELSPDDPAGLLDLRQGMFAQLVAQNVLLIDGPLSWYSDPGLAGVSLTGGLSYKEDTKELVVAKAGVYYVFFQLELRRVVAGEGSGSVSLALHLQPLRSAAGAAALALTVDLPPASSEARNSAFGFQGRLLHLSAGQRLGVHLHTEARARHAWQLTQGATVLGLFRVTPEIPAGLPSPRSE

SEQ ID NO: 616 - protein, 684 aa, Artificial Sequence
  Description of Artificial Sequence: Synthetic polypeptide
ACPWAVSGARASPGSAASPRLREGPELSPDDPAGLLDLRQGMFAQLVAQNVLLIDGPLSWYSDPGLAGVSLTGGLSYKEDTKELVVAKAGVYYVFFQLELRRVVAGEGSGSVSLALHLQPLRSAAGAAALALTVDLPPASSEARNSAFGFQGRLLHLSAGQRLGVHLHTEARARHAWQLTQGATVLGLFRVTPEIPAGLPSPRSEASTKGPSVFPLAPCSRSTSESTAALGCLVKDYFPEPVTVSWNSGALTSGVHTFPAVLQSSGLYSLSSVVTVPSSSLGTKTYTCNVDHKPSNTKVDKRVESKYGPPCPSCPAPEFLGGPSVFLFPPKPKDTLMISRTPEVTCVVVDVSQEDPEVQFNWYVDGVEVHNAKTKPREEQFNSTYRVVSVLTVLHQDWLNGKEYKCKVSNKGLPSSIEKTISKAKGQPREPQVYTLPPSQEEMTKNQVSLTCLVKGFYPSDIAVEWESNGQPENNYKTTPPVLDSDGSFFLYSRLTVDKSRWQEGNVFSCSVMHEALHNHYTQKSLSLSLGKGGGGSGGGGSGGGGSTIPPHVQKSVNNDMIVTDNNGAVKFPQLCKFCDVRFSTCDNQKSCMSNCSITSICEKPQEVCVAVWRKNDENITLETVCHDPKLPYHDFILEDAASPKCIMKEKKKPGETFFMCSCSSDECNDNIIFSEEYNTSNPD

SEQ ID NO: 617 - protein, 651 aa, Artificial Sequence
  Description of Artificial Sequence: Synthetic polypeptide
TIPPHVQKSVNNDMIVTDNNGAVKFPQLCKFCDVRFSTCDNQKSCMSNCSITSICEKPQEVCVAVWRKNDENITLETVCHDPKLPYHDFILEDAASPKCIMKEKKKPGETFFMCSCSSDECNDNIIFSEEYNTSNPDASTKGPSVFPLAPCSRSTSESTAALGCLVKDYFPEPVTVSWNSGALTSGVHTFPAVLQSSGLYSLSSVVTVPSSSLGTKTYTCNVDHKPSNTKVDKRVESKYGPPCPSCPAPEFLGGPSVFLFPPKPKDTLMISRTPEVTCVVVDVSQEDPEVQFNWYVDGVEVHNAKTKPREEQFNSTYRVVSVLTVLHQDWLNGKEYKCKVSNKGLPSSIEKTISKAKGQPREPQVYTLPPSQEEMTKNQVSLTCLVKGFYPSDIAVEWESNGQPENNYKTTPPVLDSDGSFFLYSRLTVDKSRWQEGNVFSCSVMHEALHNHYTQKSLSLSLGKGGGGSGGGGSGGGGSQRTDSIPNSPDNVPLKGGNCSEDLLCILKRAPFKKSWAYLQVAKHLNKTKLSWNKDGILHGVRYQDGNLVIQFPGLYFIICQLQFLVQCPNNSVDLKLELLINKHIKKQALVTVCESGMQTKHVYQNLSQFLLDYLQVNTTISVNVDTFQYIDTSTFPLENVLSIFLYSNSD

SEQ ID NO: 618 - protein, 651 aa, Artificial Sequence
  Description of Artificial Sequence: Synthetic polypeptide
QRTDSIPNSPDNVPLKGGNCSEDLLCILKRAPFKKSWAYLQVAKHLNKTKLSWNKDGILHGVRYQDGNLVIQFPGLYFIICQLQFLVQCPNNSVDLKLELLINKHIKKQALVTVCESGMQTKHVYQNLSQFLLDYLQVNTTISVNVDTFQYIDTSTFPLENVLSIFLYSNSDASTKGPSVFPLAPCSRSTSESTAALGCLVKDYFPEPVTVSWNSGALTSGVHTFPAVLQSSGLYSLSSVVTVPSSSLGTKTYTCNVDHKPSNTKVDKRVESKYGPPCPSCPAPEFLGGPSVFLFPPKPKDTLMISRTPEVTCVVVDVSQEDPEVQFNWYVDGVEVHNAKTKPREEQFNSTYRVVSVLTVLHQDWLNGKEYKCKVSNKGLPSSIEKTISKAKGQPREPQVYTLPPSQEEMTKNQVSLTCLVKGFYPSDIAVEWESNGQPENNYKTTPPVLDSDGSFFLYSRLTVDKSRWQEGNVFSCSVMHEALHNHYTQKSLSLSLGKGGGGSGGGGSGGGGSTIPPHVQKSVNNDMIVTDNNGAVKFPQLCKFCDVRFSTCDNQKSCMSNCSITSICEKPQEVCVAVWRKNDENITLETVCHDPKLPYHDFILEDAASPKCIMKEKKKPGETFFMCSCSSDECNDNIIFSEEYNTSNPD

SEQ ID NO: 619 - protein, 625 aa, Artificial Sequence
  Description of Artificial Sequence: Synthetic polypeptide
TIPPHVQKSVNNDMIVTDNNGAVKFPQLCKFCDVRFSTCDNQKSCMSNCSITSICEKPQEVCVAVWRKNDENITLETVCHDPKLPYHDFILEDAASPKCIMKEKKKPGETFFMCSCSSDECNDNIIFSEEYNTSNPDASTKGPSVFPLAPCSRSTSESTAALGCLVKDYFPEPVTVSWNSGALTSGVHTFPAVLQSSGLYSLSSVVTVPSSSLGTKTYTCNVDHKPSNTKVDKRVESKYGPPCPSCPAPEFLGGPSVFLFPPKPKDTLMISRTPEVTCVVVDVSQEDPEVQFNWYVDGVEVHNAKTKPREEQFNSTYRVVSVLTVLHQDWLNGKEYKCKVSNKGLPSSIEKTISKAKGQPREPQVYTLPPSQEEMTKNQVSLTCLVKGFYPSDIAVEWESNGQPENNYKTTPPVLDSDGSFFLYSRLTVDKSRWQEGNVFSCSVMHEALHNHYTQKSLSLSLGKGGGGSGGGGSGGGGSGDQNPQIAAHVISEASSKTTSVLQWAEKGYYTMSNNLVTLENGKQLTVKRQGLYYIYAQVTFCSNREASSQAPFIASLCLKSPGRFERILLRAANTHSSAKPCGQQSIHLGGVFELQPGASVFVNVTDPSQVSHGTGFTSFGLLKL

SEQ ID NO: 620 - protein, 625 aa, Artificial Sequence
  Description of Artificial Sequence: Synthetic polypeptide
GDQNPQIAAHVISEASSKTTSVLQWAEKGYYTMSNNLVTLENGKQLTVKRQGLYYIYAQVTFCSNREASSQAPFIASLCLKSPGRFERILLRAANTHSSAKPCGQQSIHLGGVFELQPGASVFVNVTDPSQVSHGTGFTSFGLLKLASTKGPSVFPLAPCSRSTSESTAALGCLVKDYFPEPVTVSWNSGALTSGVHTFPAVLQSSGLYSLSSVVTVPSSSLGTKTYTCNVDHKPSNTKVDKRVESKYGPPCPSCPAPEFLGGPSVFLFPPKPKDTLMISRTPEVTCVVVDVSQEDPEVQFNWYVDGVEVHNAKTKPREEQFNSTYRVVSVLTVLHQDWLNGKEYKCKVSNKGLPSSIEKTISKAKGQPREPQVYTLPPSQEEMTKNQVSLTCLVKGFYPSDIAVEWESNGQPENNYKTTPPVLDSDGSFFLYSRLTVDKSRWQEGNVFSCSVMHEALHNHYTQKSLSLSLGKGGGGSGGGGSGGGGSTIPPHVQKSVNNDMIVTDNNGAVKFPQLCKFCDVRFSTCDNQKSCMSNCSITSICEKPQEVCVAVWRKNDENITLETVCHDPKLPYHDFILEDAASPKCIMKEKKKPGETFFMCSCSSDECNDNIIFSEEYNTSNPD

SEQ ID NO: 621 - protein, 634 aa, Artificial Sequence
  Description of Artificial Sequence: Synthetic polypeptide
TIPPHVQKSVNNDMIVTDNNGAVKFPQLCKFCDVRFSTCDNQKSCMSNCSITSICEKPQEVCVAVWRKNDENITLETVCHDPKLPYHDFILEDAASPKCIMKEKKKPGETFFMCSCSSDECNDNIIFSEEYNTSNPDASTKGPSVFPLAPCSRSTSESTAALGCLVKDYFPEPVTVSWNSGALTSGVHTFPAVLQSSGLYSLSSVVTVPSSSLGTKTYTCNVDHKPSNTKVDKRVESKYGPPCPSCPAPEFLGGPSVFLFPPKPKDTLMISRTPEVTCVVVDVSQEDPEVQFNWYVDGVEVHNAKTKPREEQFNSTYRVVSVLTVLHQDWLNGKEYKCKVSNKGLPSSIEKTISKAKGQPREPQVYTLPPSQEEMTKNQVSLTCLVKGFYPSDIAVEWESNGQPENNYKTTPPVLDSDGSFFLYSRLTVDKSRWQEGNVFSCSVMHEALHNHYTQKSLSLSLGKGGGGSGGGGSGGGGSQRFAQAQQQLPLESLGWDVAELQLNHTGPQQDPRLYWQGGPALGRSFLHGPELDKGQLRIHRDGIYMVHIQVTLAICSSTTASRHHPTTLAVGICSPASRSISLLRLSFHQGCTIASQRLTPLARGDTLCTNLTGTLLPSRNTDETFFGVQWVRP

SEQ ID NO: 622 - protein, 634 aa, Artificial Sequence
  Description of Artificial Sequence: Synthetic polypeptide
QRFAQAQQQLPLESLGWDVAELQLNHTGPQQDPRLYWQGGPALGRSFLHGPELDKGQLRIHRDGIYMVHIQVTLAICSSTTASRHHPTTLAVGICSPASRSISLLRLSFHQGCTIASQRLTPLARGDTLCTNLTGTLLPSRNTDETFFGVQWVRPASTKGPSVFPLAPCSRSTSESTAALGCLVKDYFPEPVTVSWNSGALTSGVHTFPAVLQSSGLYSLSSVVTVPSSSLGTKTYTCNVDHKPSNTKVDKRVESKYGPPCPSCPAPEFLGGPSVFLFPPKPKDTLMISRTPEVTCVVVDVSQEDPEVQFNWYVDGVEVHNAKTKPREEQFNSTYRVVSVLTVLHQDWLNGKEYKCKVSNKGLPSSIEKTISKAKGQPREPQVYTLPPSQEEMTKNQVSLTCLVKGFYPSDIAVEWESNGQPENNYKTTPPVLDSDGSFFLYSRLTVDKSRWQEGNVFSCSVMHEALHNHYTQKSLSLSLGKGGGGSGGGGSGGGGSTIPPHVQKSVNNDMIVTDNNGAVKFPQLCKFCDVRFSTCDNQKSCMSNCSITSICEKPQEVCVAVWRKNDENITLETVCHDPKLPYHDFILEDAASPKCIMKEKKKPGETFFMCSCSSDECNDNIIFSEEYNTSNPD

SEQ ID NO: 623 - protein, 607 aa, Artificial Sequence
  Description of Artificial Sequence: Synthetic polypeptide
TIPPHVQKSVNNDMIVTDNNGAVKFPQLCKFCDVRFSTCDNQKSCMSNCSITSICEKPQEVCVAVWRKNDENITLETVCHDPKLPYHDFILEDAASPKCIMKEKKKPGETFFMCSCSSDECNDNIIFSEEYNTSNPDASTKGPSVFPLAPCSRSTSESTAALGCLVKDYFPEPVTVSWNSGALTSGVHTFPAVLQSSGLYSLSSVVTVPSSSLGTKTYTCNVDHKPSNTKVDKRVESKYGPPCPSCPAPEFLGGPSVFLFPPKPKDTLMISRTPEVTCVVVDVSQEDPEVQFNWYVDGVEVHNAKTKPREEQFNSTYRVVSVLTVLHQDWLNGKEYKCKVSNKGLPSSIEKTISKAKGQPREPQVYTLPPSQEEMTKNQVSLTCLVKGFYPSDIAVEWESNGQPENNYKTTPPVLDSDGSFFLYSRLTVDKSRWQEGNVFSCSVMHEALHNHYTQKSLSLSLGKGGGGSGGGGSGGGGSQLETAKEPCMAKFGPLPSKWQMASSEPPCVNKVSDWKLEILQNGLYLIYGQVAPNANYNDVAPFEVRLYKNKDMIQTLTNKSKIQNVGGTYELHVGDTIDLIFNSEHQVLKNNTYWGIILLANPQFIS

SEQ ID NO: 624 - protein, 607 aa, Artificial Sequence
  Description of Artificial Sequence: Synthetic polypeptide
QLETAKEPCMAKFGPLPSKWQMASSEPPCVNKVSDWKLEILQNGLYLIYGQVAPNANYNDVAPFEVRLYKNKDMIQTLTNKSKIQNVGGTYELHVGDTIDLIFNSEHQVLKNNTYWGIILLANPQFISASTKGPSVFPLAPCSRSTSESTAALGCLVKDYFPEPVTVSWNSGALTSGVHTFPAVLQSSGLYSLSSVVTVPSSSLGTKTYTCNVDHKPSNTKVDKRVESKYGPPCPSCPAPEFLGGPSVFLFPPKPKDTLMISRTPEVTCVVVDVSQEDPEVQFNWYVDGVEVHNAKTKPREEQFNSTYRVVSVLTVLHQDWLNGKEYKCKVSNKGLPSSIEKTISKAKGQPREPQVYTLPPSQEEMTKNQVSLTCLVKGFYPSDIAVEWESNGQPENNYKTTPPVLDSDGSFFLYSRLTVDKSRWQEGNVFSCSVMHEALHNHYTQKSLSLSLGKGGGGSGGGGSGGGGSTIPPHVQKSVNNDMIVTDNNGAVKFPQLCKFCDVRFSTCDNQKSCMSNCSITSICEKPQEVCVAVWRKNDENITLETVCHDPKLPYHDFILEDAASPKCIMKEKKKPGETFFMCSCSSDECNDNIIFSEEYNTSNPD

SEQ ID NO: 625 - protein, 719 aa, Artificial Sequence
  Description of Artificial Sequence: Synthetic polypeptide
TIPPHVQKSVNNDMIVTDNNGAVKFPQLCKFCDVRFSTCDNQKSCMSNCSITSICEKPQEVCVAVWRKNDENITLETVCHDPKLPYHDFILEDAASPKCIMKEKKKPGETFFMCSCSSDECNDNIIFSEEYNTSNPDASTKGPSVFPLAPCSRSTSESTAALGCLVKDYFPEPVTVSWNSGALTSGVHTFPAVLQSSGLYSLSSVVTVPSSSLGTKTYTCNVDHKPSNTKVDKRVESKYGPPCPSCPAPEFLGGPSVFLFPPKPKDTLMISRTPEVTCVVVDVSQEDPEVQFNWYVDGVEVHNAKTKPREEQFNSTYRVVSVLTVLHQDWLNGKEYKCKVSNKGLPSSIEKTISKAKGQPREPQVYTLPPSQEEMTKNQVSLTCLVKGFYPSDIAVEWESNGQPENNYKTTPPVLDSDGSFFLYSRLTVDKSRWQEGNVFSCSVMHEALHNHYTQKSLSLSLGKGGGGSGGGGSGGGGSDTQEKEVRAMVGSDVELSCACPEGSRFDLNDVYVYWQTSESKTVVTYHIPQNSSLENVDSRYRNRALMSPAGMLRGDFSLRLFNVTPQDEQKFHCLVLSQSLGFQEVLSVEVTLHVAANFSVPVVSAPHSPSQDELTFTCTSINGYPRPNVYWINKTDNSLLDQALQNDTVFLNMRGLYDVVSVLRIARTPSVNIGCCIENVLLQQNLTVGSQTGNDIGERDKITENPVSTGEKNAATWS

SEQ ID NO: 626 - protein, 719 aa, Artificial Sequence
  Description of Artificial Sequence: Synthetic polypeptide
DTQEKEVRAMVGSDVELSCACPEGSRFDLNDVYVYWQTSESKTVVTYHIPQNSSLENVDSRYRNRALMSPAGMLRGDFSLRLFNVTPQDEQKFHCLVLSQSLGFQEVLSVEVTLHVAANFSVPVVSAPHSPSQDELTFTCTSINGYPRPNVYWINKTDNSLLDQALQNDTVFLNMRGLYDVVSVLRIARTPSVNIGCCIENVLLQQNLTVGSQTGNDIGERDKITENPVSTGEKNAATWSASTKGPSVFPLAPCSRSTSESTAALGCLVKDYFPEPVTVSWNSGALTSGVHTFPAVLQSSGLYSLSSVVTVPSSSLGTKTYTCNVDHKPSNTKVDKRVESKYGPPCPSCPAPEFLGGPSVFLFPPKPKDTLMISRTPEVTCVVVDVSQEDPEVQFNWYVDGVEVHNAKTKPREEQFNSTYRVVSVLTVLHQDWLNGKEYKCKVSNKGLPSSIEKTISKAKGQPREPQVYTLPPSQEEMTKNQVSLTCLVKGFYPSDIAVEWESNGQPENNYKTTPPVLDSDGSFFLYSRLTVDKSRWQEGNVFSCSVMHEALHNHYTQKSLSLSLGKGGGGSGGGGSGGGGSTIPPHVQKSVNNDMIVTDNNGAVKFPQLCKFCDVRFSTCDNQKSCMSNCSITSICEKPQEVCVAVWRKNDENITLETVCHDPKLPYHDFILEDAASPKCIMKEKKKPGETFFMCSCSSDECNDNIIFSEEYNTSNPD

SEQ ID NO: 627 - protein, 646 aa, Artificial Sequence
  Description of Artificial Sequence: Synthetic polypeptide
TIPPHVQKSVNNDMIVTDNNGAVKFPQLCKFCDVRFSTCDNQKSCMSNCSITSICEKPQEVCVAVWRKNDENITLETVCHDPKLPYHDFILEDAASPKCIMKEKKKPGETFFMCSCSSDECNDNIIFSEEYNTSNPDASTKGPSVFPLAPCSRSTSESTAALGCLVKDYFPEPVTVSWNSGALTSGVHTFPAVLQSSGLYSLSSVVTVPSSSLGTKTYTCNVDHKPSNTKVDKRVESKYGPPCPSCPAPEFLGGPSVFLFPPKPKDTLMISRTPEVTCVVVDVSQEDPEVQFNWYVDGVEVHNAKTKPREEQFNSTYRVVSVLTVLHQDWLNGKEYKCKVSNKGLPSSIEKTISKAKGQPREPQVYTLPPSQEEMTKNQVSLTCLVKGFYPSDIAVEWESNGQPENNYKTTPPVLDSDGSFFLYSRLTVDKSRWQEGNVFSCSVMHEALHNHYTQKSLSLSLGKGGGGSGGGGSGGGGSDGPAGSWEQLIQERRSHEVNPAAHLTGANSSLTGSGGPLLWETQLGLAFLRGLSYHDGALVVTKAGYYYIYSKVQLGGVGCPLGLASTITHGLYKRTPRYPEELELLVSQQSPCGRATSSSRVWWDSSFLGGVVHLEAGEKVVVRVLDERLVRLRDGTRSYFGAFMV

SEQ ID NO: 628 - protein, 646 aa, Artificial Sequence
  Description of Artificial Sequence: Synthetic polypeptide
DGPAGSWEQLIQERRSHEVNPAAHLTGANSSLTGSGGPLLWETQLGLAFLRGLSYHDGALVVTKAGYYYIYSKVQLGGVGCPLGLASTITHGLYKRTPRYPEELELLVSQQSPCGRATSSSRVWWDSSFLGGVVHLEAGEKVVVRVLDERLVRLRDGTRSYFGAFMVASTKGPSVFPLAPCSRSTSESTAALGCLVKDYFPEPVTVSWNSGALTSGVHTFPAVLQSSGLYSLSSVVTVPSSSLGTKTYTCNVDHKPSNTKVDKRVESKYGPPCPSCPAPEFLGGPSVFLFPPKPKDTLMISRTPEVTCVVVDVSQEDPEVQFNWYVDGVEVHNAKTKPREEQFNSTYRVVSVLTVLHQDWLNGKEYKCKVSNKGLPSSIEKTISKAKGQPREPQVYTLPPSQEEMTKNQVSLTCLVKGFYPSDIAVEWESNGQPENNYKTTPPVLDSDGSFFLYSRLTVDKSRWQEGNVFSCSVMHEALHNHYTQKSLSLSLGKGGGGSGGGGSGGGGSTIPPHVQKSVNNDMIVTDNNGAVKFPQLCKFCDVRFSTCDNQKSCMSNCSITSICEKPQEVCVAVWRKNDENITLETVCHDPKLPYHDFILEDAASPKCIMKEKKKPGETFFMCSCSSDECNDNIIFSEEYNTSNPD

SEQ ID NO: 629 - protein, 612 aa, Artificial Sequence
  Description of Artificial Sequence: Synthetic polypeptide
TIPPHVQKSVNNDMIVTDNNGAVKFPQLCKFCDVRFSTCDNQKSCMSNCSITSICEKPQEVCVAVWRKNDENITLETVCHDPKLPYHDFILEDAASPKCIMKEKKKPGETFFMCSCSSDECNDNIIFSEEYNTSNPDASTKGPSVFPLAPCSRSTSESTAALGCLVKDYFPEPVTVSWNSGALTSGVHTFPAVLQSSGLYSLSSVVTVPSSSLGTKTYTCNVDHKPSNTKVDKRVESKYGPPCPSCPAPEFLGGPSVFLFPPKPKDTLMISRTPEVTCVVVDVSQEDPEVQFNWYVDGVEVHNAKTKPREEQFNSTYRVVSVLTVLHQDWLNGKEYKCKVSNKGLPSSIEKTISKAKGQPREPQVYTLPPSQEEMTKNQVSLTCLVKGFYPSDIAVEWESNGQPENNYKTTPPVLDSDGSFFLYSRLTVDKSRWQEGNVFSCSVMHEALHNHYTQKSLSLSLGKGGGGSGGGGSGGGGSQVSHRYPRIQSIKVQFTEYKKEKGFILTSQKEDEIMKVQNNSVIINCDGFYLISLKGYFSQEVNISLHYQKDEEPLFQLKKVRSVNSLMVASLTYKDKVYLNVTTDNTSLDDFHVNGGELILIHQNPGEFCVL

SEQ ID NO: 630 - protein, 612 aa, Artificial Sequence
  Description of Artificial Sequence: Synthetic polypeptide
QVSHRYPRIQSIKVQFTEYKKEKGFILTSQKEDEIMKVQNNSVIINCDGFYLISLKGYFSQEVNISLHYQKDEEPLFQLKKVRSVNSLMVASLTYKDKVYLNVTTDNTSLDDFHVNGGELILIHQNPGEFCVLASTKGPSVFPLAPCSRSTSESTAALGCLVKDYFPEPVTVSWNSGALTSGVHTFPAVLQSSGLYSLSSVVTVPSSSLGTKTYTCNVDHKPSNTKVDKRVESKYGPPCPSCPAPEFLGGPSVFLFPPKPKDTLMISRTPEVTCVVVDVSQEDPEVQFNWYVDGVEVHNAKTKPREEQFNSTYRVVSVLTVLHQDWLNGKEYKCKVSNKGLPSSIEKTISKAKGQPREPQVYTLPPSQEEMTKNQVSLTCLVKGFYPSDIAVEWESNGQPENNYKTTPPVLDSDGSFFLYSRLTVDKSRWQEGNVFSCSVMHEALHNHYTQKSLSLSLGKGGGGSGGGGSGGGGSTIPPHVQKSVNNDMIVTDNNGAVKFPQLCKFCDVRFSTCDNQKSCMSNCSITSICEKPQEVCVAVWRKNDENITLETVCHDPKLPYHDFILEDAASPKCIMKEKKKPGETFFMCSCSSDECNDNIIFSEEYNTSNPD

SEQ ID NO: 631 - protein, 752 aa, Artificial Sequence
  Description of Artificial Sequence: Synthetic polypeptide
SDTGRPFVEMYSEIPEIIHMTEGRELVIPCRVTSPNITVTLKKFPLDTLIPDGKRIIWDSRKGFIISNATYKEIGLLTCEATVNGHLYKTNYLTHRQTNTIIDVVLSPSHGIELSVGEKLVLNCTARTELNVGIDFNWEYPSSKHQHKKLVNRDLKTQSGSEMKKFLSTLTIDGVTRSDQGLYTCAASSGLMTKKNSTFVRVHEKASTKGPSVFPLAPCSRSTSESTAALGCLVKDYFPEPVTVSWNSGALTSGVHTFPAVLQSSGLYSLSSVVTVPSSSLGTKTYTCNVDHKPSNTKVDKRVESKYGPPCPSCPAPEFLGGPSVFLFPPKPKDTLMISRTPEVTCVVVDVSQEDPEVQFNWYVDGVEVHNAKTKPREEQFNSTYRVVSVLTVLHQDWLNGKEYKCKVSNKGLPSSIEKTISKAKGQPREPQVYTLPPSQEEMTKNQVSLTCLVKGFYPSDIAVEWESNGQPENNYKTTPPVLDSDGSFFLYSRLTVDKSRWQEGNVFSCSVMHEALHNHYTQKSLSLSLGKGGGGSGGGGSGGGGSACPWAVSGARASPGSAASPRLREGPELSPDDPAGLLDLRQGMFAQLVAQNVLLIDGPLSWYSDPGLAGVSLTGGLSYKEDTKELVVAKAGVYYVFFQLELRRVVAGEGSGSVSLALHLQPLRSAAGAAALALTVDLPPASSEARNSAFGFQGRLLHLSAGQRLGVHLHTEARARHAWQLTQGATVLGLFRVTPEIPAGLPSPRSE

SEQ ID NO: 632 - protein, 752 aa, Artificial Sequence
  Description of Artificial Sequence: Synthetic polypeptide
ACPWAVSGARASPGSAASPRLREGPELSPDDPAGLLDLRQGMFAQLVAQNVLLIDGPLSWYSDPGLAGVSLTGGLSYKEDTKELVVAKAGVYYVFFQLELRRVVAGEGSGSVSLALHLQPLRSAAGAAALALTVDLPPASSEARNSAFGFQGRLLHLSAGQRLGVHLHTEARARHAWQLTQGATVLGLFRVTPEIPAGLPSPRSEASTKGPSVFPLAPCSRSTSESTAALGCLVKDYFPEPVTVSWNSGALTSGVHTFPAVLQSSGLYSLSSVVTVPSSSLGTKTYTCNVDHKPSNTKVDKRVESKYGPPCPSCPAPEFLGGPSVFLFPPKPKDTLMISRTPEVTCVVVDVSQEDPEVQFNWYVDGVEVHNAKTKPREEQFNSTYRVVSVLTVLHQDWLNGKEYKCKVSNKGLPSSIEKTISKAKGQPREPQVYTLPPSQEEMTKNQVSLTCLVKGFYPSDIAVEWESNGQPENNYKTTPPVLDSDGSFFLYSRLTVDKSRWQEGNVFSCSVMHEALHNHYTQKSLSLSLGKGGGGSGGGGSGGGGSSDTGRPFVEMYSEIPEIIHMTEGRELVIPCRVTSPNITVTLKKFPLDTLIPDGKRIIWDSRKGFIISNATYKEIGLLTCEATVNGHLYKTNYLTHRQTNTIIDVVLSPSHGIELSVGEKLVLNCTARTELNVGIDFNWEYPSSKHQHKKLVNRDLKTQSGSEMKKFLSTLTIDGVTRSDQGLYTCAASSGLMTKKNSTFVRVHEK

SEQ ID NO: 633 - protein, 719 aa, Artificial Sequence
  Description of Artificial Sequence: Synthetic polypeptide
SDTGRPFVEMYSEIPEIIHMTEGRELVIPCRVTSPNITVTLKKFPLDTLIPDGKRIIWDSRKGFIISNATYKEIGLLTCEATVNGHLYKTNYLTHRQTNTIIDVVLSPSHGIELSVGEKLVLNCTARTELNVGIDFNWEYPSSKHQHKKLVNRDLKTQSGSEMKKFLSTLTIDGVTRSDQGLYTCAASSGLMTKKNSTFVRVHEKASTKGPSVFPLAPCSRSTSESTAALGCLVKDYFPEPVTVSWNSGALTSGVHTFPAVLQSSGLYSLSSVVTVPSSSLGTKTYTCNVDHKPSNTKVDKRVESKYGPPCPSCPAPEFLGGPSVFLFPPKPKDTLMISRTPEVTCVVVDVSQEDPEVQFNWYVDGVEVHNAKTKPREEQFNSTYRVVSVLTVLHQDWLNGKEYKCKVSNKGLPSSIEKTISKAKGQPREPQVYTLPPSQEEMTKNQVSLTCLVKGFYPSDIAVEWESNGQPENNYKTTPPVLDSDGSFFLYSRLTVDKSRWQEGNVFSCSVMHEALHNHYTQKSLSLSLGKGGGGSGGGGSGGGGSQRTDSIPNSPDNVPLKGGNCSEDLLCILKRAPFKKSWAYLQVAKHLNKTKLSWNKDGILHGVRYQDGNLVIQFPGLYFIICQLQFLVQCPNNSVDLKLELLINKHIKKQALVTVCESGMQTKHVYQNLSQFLLDYLQVNTTISVNVDTFQYIDTSTFPLENVLSIFLYSNSD

SEQ ID NO: 634 - protein, 719 aa, Artificial Sequence
  Description of Artificial Sequence: Synthetic polypeptide
QRTDSIPNSPDNVPLKGGNCSEDLLCILKRAPFKKSWAYLQVAKHLNKTKLSWNKDGILHGVRYQDGNLVIQFPGLYFIICQLQFLVQCPNNSVDLKLELLINKHIKKQALVTVCESGMQTKHVYQNLSQFLLDYLQVNTTISVNVDTFQYIDTSTFPLENVLSIFLYSNSDASTKGPSVFPLAPCSRSTSESTAALGCLVKDYFPEPVTVSWNSGALTSGVHTFPAVLQSSGLYSLSSVVTVPSSSLGTKTYTCNVDHKPSNTKVDKRVESKYGPPCPSCPAPEFLGGPSVFLFPPKPKDTLMISRTPEVTCVVVDVSQEDPEVQFNWYVDGVEVHNAKTKPREEQFNSTYRVVSVLTVLHQDWLNGKEYKCKVSNKGLPSSIEKTISKAKGQPREPQVYTLPPSQEEMTKNQVSLTCLVKGFYPSDIAVEWESNGQPENNYKTTPPVLDSDGSFFLYSRLTVDKSRWQEGNVFSCSVMHEALHNHYTQKSLSLSLGKGGGGSGGGGSGGGGSSDTGRPFVEMYSEIPEIIHMTEGRELVIPCRVTSPNITVTLKKFPLDTLIPDGKRIIWDSRKGFIISNATYKEIGLLTCEATVNGHLYKTNYLTHRQTNTIIDVVLSPSHGIELSVGEKLVLNCTARTELNVGIDFNWEYPSSKHQHKKLVNRDLKTQSGSEMKKFLSTLTIDGVTRSDQGLYTCAASSGLMTKKNSTFVRVHEK

SEQ ID NO: 635 - protein, 693 aa, Artificial Sequence
  Description of Artificial Sequence: Synthetic polypeptide
SDTGRPFVEMYSEIPEIIHMTEGRELVIPCRVTSPNITVTLKKFPLDTLIPDGKRIIWDSRKGFIISNATYKEIGLLTCEATVNGHLYKTNYLTHRQTNTIIDVVLSPSHGIELSVGEKLVLNCTARTELNVGIDFNWEYPSSKHQHKKLVNRDLKTQSGSEMKKFLSTLTIDGVTRSDQGLYTCAASSGLMTKKNSTFVRVHEKASTKGPSVFPLAPCSRSTSESTAALGCLVKDYFPEPVTVSWNSGALTSGVHTFPAVLQSSGLYSLSSVVTVPSSSLGTKTYTCNVDHKPSNTKVDKRVESKYGPPCPSCPAPEFLGGPSVFLFPPKPKDTLMISRTPEVTCVVVDVSQEDPEVQFNWYVDGVEVHNAKTKPREEQFNSTYRVVSVLTVLHQDWLNGKEYKCKVSNKGLPSSIEKTISKAKGQPREPQVYTLPPSQEEMTKNQVSLTCLVKGFYPSDIAVEWESNGQPENNYKTTPPVLDSDGSFFLYSRLTVDKSRWQEGNVFSCSVMHEALHNHYTQKSLSLSLGKGGGGSGGGGSGGGGSGDQNPQIAAHVISEASSKTTSVLQWAEKGYYTMSNNLVTLENGKQLTVKRQGLYYIYAQVTFCSNREASSQAPFIASLCLKSPGRFERILLRAANTHSSAKPCGQQSIHLGGVFELQPGASVFVNVTDPSQVSHGTGFTSFGLLKL

SEQ ID NO: 636 - protein, 693 aa, Artificial Sequence
  Description of Artificial Sequence: Synthetic polypeptide
GDQNPQIAAHVISEASSKTTSVLQWAEKGYYTMSNNLVTLENGKQLTVKRQGLYYIYAQVTFCSNREASSQAPFIASLCLKSPGRFERILLRAANTHSSAKPCGQQSIHLGGVFELQPGASVFVNVTDPSQVSHGTGFTSFGLLKLASTKGPSVFPLAPCSRSTSESTAALGCLVKDYFPEPVTVSWNSGALTSGVHTFPAVLQSSGLYSLSSVVTVPSSSLGTKTYTCNVDHKPSNTKVDKRVESKYGPPCPSCPAPEFLGGPSVFLFPPKPKDTLMISRTPEVTCVVVDVSQEDPEVQFNWYVDGVEVHNAKTKPREEQFNSTYRVVSVLTVLHQDWLNGKEYKCKVSNKGLPSSIEKTISKAKGQPREPQVYTLPPSQEEMTKNQVSLTCLVKGFYPSDIAVEWESNGQPENNYKTTPPVLDSDGSFFLYSRLTVDKSRWQEGNVFSCSVMHEALHNHYTQKSLSLSLGKGGGGSGGGGSGGGGSSDTGRPFVEMYSEIPEIIHMTEGRELVIPCRVTSPNITVTLKKFPLDTLIPDGKRIIWDSRKGFIISNATYKEIGLLTCEATVNGHLYKTNYLTHRQTNTIIDVVLSPSHGIELSVGEKLVLNCTARTELNVGIDFNWEYPSSKHQHKKLVNRDLKTQSGSEMKKFLSTLTIDGVTRSDQGLYTCAASSGLMTKKNSTFVRVHEK

SEQ ID NO: 637 - protein, 702 aa, Artificial Sequence
  Description of Artificial Sequence: Synthetic polypeptide
SDTGRPFVEMYSEIPEIIHMTEGRELVIPCRVTSPNITVTLKKFPLDTLIPDGKRIIWDSRKGFIISNATYKEIGLLTCEATVNGHLYKTNYLTHRQTNTIIDVVLSPSHGIELSVGEKLVLNCTARTELNVGIDFNWEYPSSKHQHKKLVNRDLKTQSGSEMKKFLSTLTIDGVTRSDQGLYTCAASSGLMTKKNSTFVRVHEKASTKGPSVFPLAPCSRSTSESTAALGCLVKDYFPEPVTVSWNSGALTSGVHTFPAVLQSSGLYSLSSVVTVPSSSLGTKTYTCNVDHKPSNTKVDKRVESKYGPPCPSCPAPEFLGGPSVFLFPPKPKDTLMISRTPEVTCVVVDVSQEDPEVQFNWYVDGVEVHNAKTKPREEQFNSTYRVVSVLTVLHQDWLNGKEYKCKVSNKGLPSSIEKTISKAKGQPREPQVYTLPPSQEEMTKNQVSLTCLVKGFYPSDIAVEWESNGQPENNYKTTPPVLDSDGSFFLYSRLTVDKSRWQEGNVFSCSVMHEALHNHYTQKSLSLSLGKGGGGSGGGGSGGGGSQRFAQAQQQLPLESLGWDVAELQLNHTGPQQDPRLYWQGGPALGRSFLHGPELDKGQLRIHRDGIYMVHIQVTLAICSSTTASRHHPTTLAVGICSPASRSISLLRLSFHQGCTIASQRLTPLARGDTLCTNLTGTLLPSRNTDETFFGVQWVRP

SEQ ID NO: 638 - protein, 702 aa, Artificial Sequence
  Description of Artificial Sequence: Synthetic polypeptide
QRFAQAQQQLPLESLGWDVAELQLNHTGPQQDPRLYWQGGPALGRSFLHGPELDKGQLRIHRDGIYMVHIQVTLAICSSTTASRHHPTTLAVGICSPASRSISLLRLSFHQGCTIASQRLTPLARGDTLCTNLTGTLLPSRNTDETFFGVQWVRPASTKGPSVFPLAPCSRSTSESTAALGCLVKDYFPEPVTVSWNSGALTSGVHTFPAVLQSSGLYSLSSVVTVPSSSLGTKTYTCNVDHKPSNTKVDKRVESKYGPPCPSCPAPEFLGGPSVFLFPPKPKDTLMISRTPEVTCVVVDVSQEDPEVQFNWYVDGVEVHNAKTKPREEQFNSTYRVVSVLTVLHQDWLNGKEYKCKVSNKGLPSSIEKTISKAKGQPREPQVYTLPPSQEEMTKNQVSLTCLVKGFYPSDIAVEWESNGQPENNYKTTPPVLDSDGSFFLYSRLTVDKSRWQEGNVFSCSVMHEALHNHYTQKSLSLSLGKGGGGSGGGGSGGGGSSDTGRPFVEMYSEIPEIIHMTEGRELVIPCRVTSPNITVTLKKFPLDTLIPDGKRIIWDSRKGFIISNATYKEIGLLTCEATVNGHLYKTNYLTHRQTNTIIDVVLSPSHGIELSVGEKLVLNCTARTELNVGIDFNWEYPSSKHQHKKLVNRDLKTQSGSEMKKFLSTLTIDGVTRSDQGLYTCAASSGLMTKKNSTFVRVHEK

SEQ ID NO: 639 - protein, 675 aa, Artificial Sequence
  Description of Artificial Sequence: Synthetic polypeptide
SDTGRPFVEMYSEIPEIIHMTEGRELVIPCRVTSPNITVTLKKFPLDTLIPDGKRIIWDSRKGFIISNATYKEIGLLTCEATVNGHLYKTNYLTHRQTNTIIDVVLSPSHGIELSVGEKLVLNCTARTELNVGIDFNWEYPSSKHQHKKLVNRDLKTQSGSEMKKFLSTLTIDGVTRSDQGLYTCAASSGLMTKKNSTFVRVHEKASTKGPSVFPLAPCSRSTSESTAALGCLVKDYFPEPVTVSWNSGALTSGVHTFPAVLQSSGLYSLSSVVTVPSSSLGTKTYTCNVDHKPSNTKVDKRVESKYGPPCPSCPAPEFLGGPSVFLFPPKPKDTLMISRTPEVTCVVVDVSQEDPEVQFNWYVDGVEVHNAKTKPREEQFNSTYRVVSVLTVLHQDWLNGKEYKCKVSNKGLPSSIEKTISKAKGQPREPQVYTLPPSQEEMTKNQVSLTCLVKGFYPSDIAVEWESNGQPENNYKTTPPVLDSDGSFFLYSRLTVDKSRWQEGNVFSCSVMHEALHNHYTQKSLSLSLGKGGGGSGGGGSGGGGSQLETAKEPCMAKFGPLPSKWQMASSEPPCVNKVSDWKLEILQNGLYLIYGQVAPNANYNDVAPFEVRLYKNKDMIQTLTNKSKIQNVGGTYELHVGDTIDLIFNSEHQVLKNNTYWGIILLANPQFIS

SEQ ID NO: 640 - protein, 675 aa, Artificial Sequence
  Description of Artificial Sequence: Synthetic polypeptide
QLETAKEPCMAKFGPLPSKWQMASSEPPCVNKVSDWKLEILQNGLYLIYGQVAPNANYNDVAPFEVRLYKNKDMIQTLTNKSKIQNVGGTYELHVGDTIDLIFNSEHQVLKNNTYWGIILLANPQFISASTKGPSVFPLAPCSRSTSESTAALGCLVKDYFPEPVTVSWNSGALTSGVHTFPAVLQSSGLYSLSSVVTVPSSSLGTKTYTCNVDHKPSNTKVDKRVESKYGPPCPSCPAPEFLGGPSVFLFPPKPKDTLMISRTPEVTCVVVDVSQEDPEVQFNWYVDGVEVHNAKTKPREEQFNSTYRVVSVLTVLHQDWLNGKEYKCKVSNKGLPSSIEKTISKAKGQPREPQVYTLPPSQEEMTKNQVSLTCLVKGFYPSDIAVEWESNGQPENNYKTTPPVLDSDGSFFLYSRLTVDKSRWQEGNVFSCSVMHEALHNHYTQKSLSLSLGKGGGGSGGGGSGGGGSSDTGRPFVEMYSEIPEIIHMTEGRELVIPCRVTSPNITVTLKKFPLDTLIPDGKRIIWDSRKGFIISNATYKEIGLLTCEATVNGHLYKTNYLTHRQTNTIIDVVLSPSHGIELSVGEKLVLNCTARTELNVGIDFNWEYPSSKHQHKKLVNRDLKTQSGSEMKKFLSTLTIDGVTRSDQGLYTCAASSGLMTKKNSTFVRVHEK

SEQ ID NO: 641 - protein, 787 aa, Artificial Sequence
  Description of Artificial Sequence: Synthetic polypeptide
SDTGRPFVEMYSEIPEIIHMTEGRELVIPCRVTSPNITVTLKKFPLDTLIPDGKRIIWDSRKGFIISNATYKEIGLLTCEATVNGHLYKTNYLTHRQTNTIIDVVLSPSHGIELSVGEKLVLNCTARTELNVGIDFNWEYPSSKHQHKKLVNRDLKTQSGSEMKKFLSTLTIDGVTRSDQGLYTCAASSGLMTKKNSTFVRVHEKASTKGPSVFPLAPCSRSTSESTAALGCLVKDYFPEPVTVSWNSGALTSGVHTFPAVLQSSGLYSLSSVVTVPSSSLGTKTYTCNVDHKPSNTKVDKRVESKYGPPCPSCPAPEFLGGPSVFLFPPKPKDTLMISRTPEVTCVVVDVSQEDPEVQFNWYVDGVEVHNAKTKPREEQFNSTYRVVSVLTVLHQDWLNGKEYKCKVSNKGLPSSIEKTISKAKGQPREPQVYTLPPSQEEMTKNQVSLTCLVKGFYPSDIAVEWESNGQPENNYKTTPPVLDSDGSFFLYSRLTVDKSRWQEGNVFSCSVMHEALHNHYTQKSLSLSLGKGGGGSGGGGSGGGGSDTQEKEVRAMVGSDVELSCACPEGSRFDLNDVYVYWQTSESKTVVTYHIPQNSSLENVDSRYRNRALMSPAGMLRGDFSLRLFNVTPQDEQKFHCLVLSQSLGFQEVLSVEVTLHVAANFSVPVVSAPHSPSQDELTFTCTSINGYPRPNVYWINKTDNSLLDQALQNDTVFLNMRGLYDVVSVLRIARTPSVNIGCCIENVLLQQNLTVGSQTGNDIGERDKITENPVSTGEKNAATWS

SEQ ID NO: 642 - protein, 787 aa, Artificial Sequence
  Description of Artificial Sequence: Synthetic polypeptide
DTQEKEVRAMVGSDVELSCACPEGSRFDLNDVYVYWQTSESKTVVTYHIPQNSSLENVDSRYRNRALMSPAGMLRGDFSLRLFNVTPQDEQKFHCLVLSQSLGFQEVLSVEVTLHVAANFSVPVVSAPHSPSQDELTFTCTSINGYPRPNVYWINKTDNSLLDQALQNDTVFLNMRGLYDVVSVLRIARTPSVNIGCCIENVLLQQNLTVGSQTGNDIGERDKITENPVSTGEKNAATWSASTKGPSVFPLAPCSRSTSESTAALGCLVKDYFPEPVTVSWNSGALTSGVHTFPAVLQSSGLYSLSSVVTVPSSSLGTKTYTCNVDHKPSNTKVDKRVESKYGPPCPSCPAPEFLGGPSVFLFPPKPKDTLMISRTPEVTCVVVDVSQEDPEVQFNWYVDGVEVHNAKTKPREEQFNSTYRVVSVLTVLHQDWLNGKEYKCKVSNKGLPSSIEKTISKAKGQPREPQVYTLPPSQEEMTKNQVSLTCLVKGFYPSDIAVEWESNGQPENNYKTTPPVLDSDGSFFLYSRLTVDKSRWQEGNVFSCSVMHEALHNHYTQKSLSLSLGKGGGGSGGGGSGGGGSSDTGRPFVEMYSEIPEIIHMTEGRELVIPCRVTSPNITVTLKKFPLDTLIPDGKRIIWDSRKGFIISNATYKEIGLLTCEATVNGHLYKTNYLTHRQTNTIIDVVLSPSHGIELSVGEKLVLNCTARTELNVGIDFNWEYPSSKHQHKKLVNRDLKTQSGSEMKKFLSTLTIDGVTRSDQGLYTCAASSGLMTKKNSTFVRVHEK

SEQ ID NO: 643 - protein, 714 aa, Artificial Sequence
  Description of Artificial Sequence: Synthetic polypeptide
SDTGRPFVEMYSEIPEIIHMTEGRELVIPCRVTSPNITVTLKKFPLDTLIPDGKRIIWDSRKGFIISNATYKEIGLLTCEATVNGHLYKTNYLTHRQTNTIIDVVLSPSHGIELSVGEKLVLNCTARTELNVGIDFNWEYPSSKHQHKKLVNRDLKTQSGSEMKKFLSTLTIDGVTRSDQGLYTCAASSGLMTKKNSTFVRVHEKASTKGPSVFPLAPCSRSTSESTAALGCLVKDYFPEPVTVSWNSGALTSGVHTFPAVLQSSGLYSLSSVVTVPSSSLGTKTYTCNVDHKPSNTKVDKRVESKYGPPCPSCPAPEFLGGPSVFLFPPKPKDTLMISRTPEVTCVVVDVSQEDPEVQFNWYVDGVEVHNAKTKPREEQFNSTYRVVSVLTVLHQDWLNGKEYKCKVSNKGLPSSIEKTISKAKGQPREPQVYTLPPSQEEMTKNQVSLTCLVKGFYPSDIAVEWESNGQPENNYKTTPPVLDSDGSFFLYSRLTVDKSRWQEGNVFSCSVMHEALHNHYTQKSLSLSLGKGGGGSGGGGSGGGGSDGPAGSWEQLIQERRSHEVNPAAHLTGANSSLTGSGGPLLWETQLGLAFLRGLSYHDGALVVTKAGYYYIYSKVQLGGVGCPLGLASTITHGLYKRTPRYPEELELLVSQQSPCGRATSSSRVWWDSSFLGGVVHLEAGEKVVVRVLDERLVRLRDGTRSYFGAFMV

SEQ ID NO: 644 - protein, 714 aa, Artificial Sequence
  Description of Artificial Sequence: Synthetic polypeptide
DGPAGSWEQLIQERRSHEVNPAAHLTGANSSLTGSGGPLLWETQLGLAFLRGLSYHDGALVVTKAGYYYIYSKVQLGGVGCPLGLASTITHGLYKRTPRYPEELELLVSQQSPCGRATSSSRVWWDSSFLGGVVHLEAGEKVVVRVLDERLVRLRDGTRSYFGAFMVASTKGPSVFPLAPCSRSTSESTAALGCLVKDYFPEPVTVSWNSGALTSGVHTFPAVLQSSGLYSLSSVVTVPSSSLGTKTYTCNVDHKPSNTKVDKRVESKYGPPCPSCPAPEFLGGPSVFLFPPKPKDTLMISRTPEVTCVVVDVSQEDPEVQFNWYVDGVEVHNAKTKPREEQFNSTYRVVSVLTVLHQDWLNGKEYKCKVSNKGLPSSIEKTISKAKGQPREPQVYTLPPSQEEMTKNQVSLTCLVKGFYPSDIAVEWESNGQPENNYKTTPPVLDSDGSFFLYSRLTVDKSRWQEGNVFSCSVMHEALHNHYTQKSLSLSLGKGGGGSGGGGSGGGGSSDTGRPFVEMYSEIPEIIHMTEGRELVIPCRVTSPNITVTLKKFPLDTLIPDGKRIIWDSRKGFIISNATYKEIGLLTCEATVNGHLYKTNYLTHRQTNTIIDVVLSPSHGIELSVGEKLVLNCTARTELNVGIDFNWEYPSSKHQHKKLVNRDLKTQSGSEMKKFLSTLTIDGVTRSDQGLYTCAASSGLMTKKNSTFVRVHEK

SEQ ID NO: 645 - protein, 680 aa, Artificial Sequence
  Description of Artificial Sequence: Synthetic polypeptide
SDTGRPFVEMYSEIPEIIHMTEGRELVIPCRVTSPNITVTLKKFPLDTLIPDGKRIIWDSRKGFIISNATYKEIGLLTCEATVNGHLYKTNYLTHRQTNTIIDVVLSPSHGIELSVGEKLVLNCTARTELNVGIDFNWEYPSSKHQHKKLVNRDLKTQSGSEMKKFLSTLTIDGVTRSDQGLYTCAASSGLMTKKNSTFVRVHEKASTKGPSVFPLAPCSRSTSESTAALGCLVKDYFPEPVTVSWNSGALTSGVHTFPAVLQSSGLYSLSSVVTVPSSSLGTKTYTCNVDHKPSNTKVDKRVESKYGPPCPSCPAPEFLGGPSVFLFPPKPKDTLMISRTPEVTCVVVDVSQEDPEVQFNWYVDGVEVHNAKTKPREEQFNSTYRVVSVLTVLHQDWLNGKEYKCKVSNKGLPSSIEKTISKAKGQPREPQVYTLPPSQEEMTKNQVSLTCLVKGFYPSDIAVEWESNGQPENNYKTTPPVLDSDGSFFLYSRLTVDKSRWQEGNVFSCSVMHEALHNHYTQKSLSLSLGKGGGGSGGGGSGGGGSQVSHRYPRIQSIKVQFTEYKKEKGFILTSQKEDEIMKVQNNSVIINCDGFYLISLKGYFSQEVNISLHYQKDEEPLFQLKKVRSVNSLMVASLTYKDKVYLNVTTDNTSLDDFHVNGGELILIHQNPGEFCVL

SEQ ID NO: 646 - protein, 680 aa, Artificial Sequence
  Description of Artificial Sequence: Synthetic polypeptide
QVSHRYPRIQSIKVQFTEYKKEKGFILTSQKEDEIMKVQNNSVIINCDGFYLISLKGYFSQEVNISLHYQKDEEPLFQLKKVRSVNSLMVASLTYKDKVYLNVTTDNTSLDDFHVNGGELILIHQNPGEFCVLASTKGPSVFPLAPCSRSTSESTAALGCLVKDYFPEPVTVSWNSGALTSGVHTFPAVLQSSGLYSLSSVVTVPSSSLGTKTYTCNVDHKPSNTKVDKRVESKYGPPCPSCPAPEFLGGPSVFLFPPKPKDTLMISRTPEVTCVVVDVSQEDPEVQFNWYVDGVEVHNAKTKPREEQFNSTYRVVSVLTVLHQDWLNGKEYKCKVSNKGLPSSIEKTISKAKGQPREPQVYTLPPSQEEMTKNQVSLTCLVKGFYPSDIAVEWESNGQPENNYKTTPPVLDSDGSFFLYSRLTVDKSRWQEGNVFSCSVMHEALHNHYTQKSLSLSLGKGGGGSGGGGSGGGGSSDTGRPFVEMYSEIPEIIHMTEGRELVIPCRVTSPNITVTLKKFPLDTLIPDGKRIIWDSRKGFIISNATYKEIGLLTCEATVNGHLYKTNYLTHRQTNTIIDVVLSPSHGIELSVGEKLVLNCTARTELNVGIDFNWEYPSSKHQHKKLVNRDLKTQSGSEMKKFLSTLTIDGVTRSDQGLYTCAASSGLMTKKNSTFVRVHEK

SEQ ID NO: 647 - protein, 668 aa, Artificial Sequence
  Description of Artificial Sequence: Synthetic polypeptide
EVQLVESGGGLVQPGGSLRLSCAASGFTFSDSWIHWVRQAPGKGLEWVAWISPYGGSTYYADSVKGRFTISADTSKNTAYLQMNSLRAEDTAVYYCARRHWPGGFDYWGQGTLVTVSAASTKGPSVFPLAPSSKSTSGGTAALGCLVKDYFPEPVTVSWNSGALTSGVHTFPAVLQSSGLYSLSSVVTVPSSSLGTQTYICNVNHKPSNTKVDKKVEPKSCDKTHTCPPCPAPELLGGPSVFLFPPKPKDTLMISRTPEVTCVVVDVSHEDPEVKFNWYVDGVEVHNAKTKPREEQYASTYRVVSVLTVLHQDWLNGKEYKCKVSNKALPAPIEKTISKAKGQPREPQVYTLPPSREEMTKNQVSLTCLVKGFYPSDIAVEWESNGQPENNYKTTPPVLDSDGSFFLYSKLTVDKSRWQQGNVFSCSVMHEALHNHYTQKSLSLSPGKGGGGSGGGGSGGGGSACPWAVSGARASPGSAASPRLREGPELSPDDPAGLLDLRQGMFAQLVAQNVLLIDGPLSWYSDPGLAGVSLTGGLSYKEDTKELVVAKAGVYYVFFQLELRRVVAGEGSGSVSLALHLQPLRSAAGAAALALTVDLPPASSEARNSAFGFQGRLLHLSAGQRLGVHLHTEARARHAWQLTQGATVLGLFRVTPEIPAGLPSPRSE

SEQ ID NO: 648 - protein, 635 aa, Artificial Sequence
  Description of Artificial Sequence: Synthetic polypeptide
EVQLVESGGGLVQPGGSLRLSCAASGFTFSDSWIHWVRQAPGKGLEWVAWISPYGGSTYYADSVKGRFTISADTSKNTAYLQMNSLRAEDTAVYYCARRHWPGGFDYWGQGTLVTVSAASTKGPSVFPLAPSSKSTSGGTAALGCLVKDYFPEPVTVSWNSGALTSGVHTFPAVLQSSGLYSLSSVVTVPSSSLGTQTYICNVNHKPSNTKVDKKVEPKSCDKTHTCPPCPAPELLGGPSVFLFPPKPKDTLMISRTPEVTCVVVDVSHEDPEVKFNWYVDGVEVHNAKTKPREEQYASTYRVVSVLTVLHQDWLNGKEYKCKVSNKALPAPIEKTISKAKGQPREPQVYTLPPSREEMTKNQVSLTCLVKGFYPSDIAVEWESNGQPENNYKTTPPVLDSDGSFFLYSKLTVDKSRWQQGNVFSCSVMHEALHNHYTQKSLSLSPGKGGGGSGGGGSGGGGSQRTDSIPNSPDNVPLKGGNCSEDLLCILKRAPFKKSWAYLQVAKHLNKTKLSWNKDGILHGVRYQDGNLVIQFPGLYFIICQLQFLVQCPNNSVDLKLELLINKHIKKQALVTVCESGMQTKHVYQNLSQFLLDYLQVNTTISVNVDTFQYIDTSTFPLENVLSIFLYSNSD

SEQ ID NO: 649 - protein, 609 aa, Artificial Sequence
  Description of Artificial Sequence: Synthetic polypeptide
EVQLVESGGGLVQPGGSLRLSCAASGFTFSDSWIHWVRQAPGKGLEWVAWISPYGGSTYYADSVKGRFTISADTSKNTAYLQMNSLRAEDTAVYYCARRHWPGGFDYWGQGTLVTVSAASTKGPSVFPLAPSSKSTSGGTAALGCLVKDYFPEPVTVSWNSGALTSGVHTFPAVLQSSGLYSLSSVVTVPSSSLGTQTYICNVNHKPSNTKVDKKVEPKSCDKTHTCPPCPAPELLGGPSVFLFPPKPKDTLMISRTPEVTCVVVDVSHEDPEVKFNWYVDGVEVHNAKTKPREEQYASTYRVVSVLTVLHQDWLNGKEYKCKVSNKALPAPIEKTISKAKGQPREPQVYTLPPSREEMTKNQVSLTCLVKGFYPSDIAVEWESNGQPENNYKTTPPVLDSDGSFFLYSKLTVDKSRWQQGNVFSCSVMHEALHNHYTQKSLSLSPGKGGGGSGGGGSGGGGSGDQNPQIAAHVISEASSKTTSVLQWAEKGYYTMSNNLVTLENGKQLTVKRQGLYYIYAQVTFCSNREASSQAPFIASLCLKSPGRFERILLRAANTHSSAKPCGQQSIHLGGVFELQPGASVFVNVTDPSQVSHGTGFTSFGLLKL

SEQ ID NO: 650 - protein, 618 aa, Artificial Sequence
  Description of Artificial Sequence: Synthetic polypeptide
EVQLVESGGGLVQPGGSLRLSCAASGFTFSDSWIHWVRQAPGKGLEWVAWISPYGGSTYYADSVKGRFTISADTSKNTAYLQMNSLRAEDTAVYYCARRHWPGGFDYWGQGTLVTVSAASTKGPSVFPLAPSSKSTSGGTAALGCLVKDYFPEPVTVSWNSGALTSGVHTFPAVLQSSGLYSLSSVVTVPSSSLGTQTYICNVNHKPSNTKVDKKVEPKSCDKTHTCPPCPAPELLGGPSVFLFPPKPKDTLMISRTPEVTCVVVDVSHEDPEVKFNWYVDGVEVHNAKTKPREEQYASTYRVVSVLTVLHQDWLNGKEYKCKVSNKALPAPIEKTISKAKGQPREPQVYTLPPSREEMTKNQVSLTCLVKGFYPSDIAVEWESNGQPENNYKTTPPVLDSDGSFFLYSKLTVDKSRWQQGNVFSCSVMHEALHNHYTQKSLSLSPGKGGGGSGGGGSGGGGSQRFAQAQQQLPLESLGWDVAELQLNHTGPQQDPRLYWQGGPALGRSFLHGPELDKGQLRIHRDGIYMVHIQVTLAICSSTTASRHHPTTLAVGICSPASRSISLLRLSFHQGCTIASQRLTPLARGDTLCTNLTGTLLPSRNTDETFFGVQWVRP

SEQ ID NO: 651 - protein, 591 aa, Artificial Sequence
  Description of Artificial Sequence: Synthetic polypeptide
EVQLVESGGGLVQPGGSLRLSCAASGFTFSDSWIHWVRQAPGKGLEWVAWISPYGGSTYYADSVKGRFTISADTSKNTAYLQMNSLRAEDTAVYYCARRHWPGGFDYWGQGTLVTVSAASTKGPSVFPLAPSSKSTSGGTAALGCLVKDYFPEPVTVSWNSGALTSGVHTFPAVLQSSGLYSLSSVVTVPSSSLGTQTYICNVNHKPSNTKVDKKVEPKSCDKTHTCPPCPAPELLGGPSVFLFPPKPKDTLMISRTPEVTCVVVDVSHEDPEVKFNWYVDGVEVHNAKTKPREEQYASTYRVVSVLTVLHQDWLNGKEYKCKVSNKALPAPIEKTISKAKGQPREPQVYTLPPSREEMTKNQVSLTCLVKGFYPSDIAVEWESNGQPENNYKTTPPVLDSDGSFFLYSKLTVDKSRWQQGNVFSCSVMHEALHNHYTQKSLSLSPGKGGGGSGGGGSGGGGSQLETAKEPCMAKFGPLPSKWQMASSEPPCVNKVSDWKLEILQNGLYLIYGQVAPNANYNDVAPFEVRLYKNKDMIQTLTNKSKIQNVGGTYELHVGDTIDLIFNSEHQVLKNNTYWGIILLANPQFIS

SEQ ID NO: 652 - protein, 703 aa, Artificial Sequence
  Description of Artificial Sequence: Synthetic polypeptide
EVQLVESGGGLVQPGGSLRLSCAASGFTFSDSWIHWVRQAPGKGLEWVAWISPYGGSTYYADSVKGRFTISADTSKNTAYLQMNSLRAEDTAVYYCARRHWPGGFDYWGQGTLVTVSAASTKGPSVFPLAPSSKSTSGGTAALGCLVKDYFPEPVTVSWNSGALTSGVHTFPAVLQSSGLYSLSSVVTVPSSSLGTQTYICNVNHKPSNTKVDKKVEPKSCDKTHTCPPCPAPELLGGPSVFLFPPKPKDTLMISRTPEVTCVVVDVSHEDPEVKFNWYVDGVEVHNAKTKPREEQYASTYRVVSVLTVLHQDWLNGKEYKCKVSNKALPAPIEKTISKAKGQPREPQVYTLPPSREEMTKNQVSLTCLVKGFYPSDIAVEWESNGQPENNYKTTPPVLDSDGSFFLYSKLTVDKSRWQQGNVFSCSVMHEALHNHYTQKSLSLSPGKGGGGSGGGGSGGGGSDTQEKEVRAMVGSDVELSCACPEGSRFDLNDVYVYWQTSESKTVVTYHIPQNSSLENVDSRYRNRALMSPAGMLRGDFSLRLFNVTPQDEQKFHCLVLSQSLGFQEVLSVEVTLHVAANFSVPVVSAPHSPSQDELTFTCTSINGYPRPNVYWINKTDNSLLDQALQNDTVFLNMRGLYDVVSVLRIARTPSVNIGCCIENVLLQQNLTVGSQTGNDIGERDKITENPVSTGEKNAATWS

SEQ ID NO: 653 - protein, 981 aa, Artificial Sequence
  Description of Artificial Sequence: Synthetic polypeptide
EVQLVESGGGLVQPGGSLRLSCAASGFTFSDSWIHWVRQAPGKGLEWVAWISPYGGSTYYADSVKGRFTISADTSKNTAYLQMNSLRAEDTAVYYCARRHWPGGFDYWGQGTLVTVSAASTKGPSVFPLAPSSKSTSGGTAALGCLVKDYFPEPVTVSWNSGALTSGVHTFPAVLQSSGLYSLSSVVTVPSSSLGTQTYICNVNHKPSNTKVDKKVEPKSCDKTHTCPPCPAPELLGGPSVFLFPPKPKDTLMISRTPEVTCVVVDVSHEDPEVKFNWYVDGVEVHNAKTKPREEQYASTYRVVSVLTVLHQDWLNGKEYKCKVSNKALPAPIEKTISKAKGQPREPQVYTLPPSREEMTKNQVSLTCLVKGFYPSDIAVEWESNGQPENNYKTTPPVLDSDGSFFLYSKLTVDKSRWQQGNVFSCSVMHEALHNHYTQKSLSLSPGKGGGGSGGGGSGGGGSIWELKKDVYVVELDWYPDAPGEMVVLTCDTPEEDGITWTLDQSSEVLGSGKTLTIQVKEFGDAGQYTCHKGGEVLSHSLLLLHKKEDGIWSTDILKDQKEPKNKTFLRCEAKNYSGRFTCWWLTTISTDLTFSVKSSRGSSDPQGVTCGAATLSAERVRGDNKEYEYSVECQEDSACPAAEESLPIEVMVDAVHKLKYENYTSSFFIRDIIKPDPPKNLQLKPLKNSRQVEVSWEYPDTWSTPHSYFSLTFCVQVQGKSKREKKDRVFTDKTSATVICRKNASISVRAQDRYYSSSWSEWASVPCSGGGGSGGGGSGGGGSRNLPVATPDPGMFPCLHHSQNLLRAVSNMLQKARQTLEFYPCTSEEIDHEDITKDKTSTVEACLPLELTKNESCLNSRETSFITNGSCLASRKTSFMMALCLSSIYEDLKMYQVEFKTMNAKLLMDPKRQIFLDQNMLAVIDELMQALNFNSETVPQKSSLEEPDFYKTKIKLCILLHAFRIRAVTIDRVMSYLNAS

SEQ ID NO: 654 - protein, 577 aa, Artificial Sequence
  Description of Artificial Sequence: Synthetic polypeptide
EVQLVESGGGLVQPGGSLRLSCAASGFTFSDSWIHWVRQAPGKGLEWVAWISPYGGSTYYADSVKGRFTISADTSKNTAYLQMNSLRAEDTAVYYCARRHWPGGFDYWGQGTLVTVSAASTKGPSVFPLAPSSKSTSGGTAALGCLVKDYFPEPVTVSWNSGALTSGVHTFPAVLQSSGLYSLSSVVTVPSSSLGTQTYICNVNHKPSNTKVDKKVEPKSCDKTHTCPPCPAPELLGGPSVFLFPPKPKDTLMISRTPEVTCVVVDVSHEDPEVKFNWYVDGVEVHNAKTKPREEQYASTYRVVSVLTVLHQDWLNGKEYKCKVSNKALPAPIEKTISKAKGQPREPQVYTLPPSREEMTKNQVSLTCLVKGFYPSDIAVEWESNGQPENNYKTTPPVLDSDGSFFLYSKLTVDKSRWQQGNVFSCSVMHEALHNHYTQKSLSLSPGKGGGGSGGGGSGGGGSNWVNVISDLKKIEDLIQSMHIDATLYTESDVHPSCKVTAMKCFLLELQVISLESGDASIHDTVENLIILANNSLSSNGNVTESGCKECEELEEKNIKEFLQSFVHIVQMFINTS

SEQ ID NO: 655 - protein, 630 aa, Artificial Sequence
  Description of Artificial Sequence: Synthetic polypeptide
EVQLVESGGGLVQPGGSLRLSCAASGFTFSDSWIHWVRQAPGKGLEWVAWISPYGGSTYYADSVKGRFTISADTSKNTAYLQMNSLRAEDTAVYYCARRHWPGGFDYWGQGTLVTVSAASTKGPSVFPLAPSSKSTSGGTAALGCLVKDYFPEPVTVSWNSGALTSGVHTFPAVLQSSGLYSLSSVVTVPSSSLGTQTYICNVNHKPSNTKVDKKVEPKSCDKTHTCPPCPAPELLGGPSVFLFPPKPKDTLMISRTPEVTCVVVDVSHEDPEVKFNWYVDGVEVHNAKTKPREEQYASTYRVVSVLTVLHQDWLNGKEYKCKVSNKALPAPIEKTISKAKGQPREPQVYTLPPSREEMTKNQVSLTCLVKGFYPSDIAVEWESNGQPENNYKTTPPVLDSDGSFFLYSKLTVDKSRWQQGNVFSCSVMHEALHNHYTQKSLSLSPGKGGGGSGGGGSGGGGSDGPAGSWEQLIQERRSHEVNPAAHLTGANSSLTGSGGPLLWETQLGLAFLRGLSYHDGALVVTKAGYYYIYSKVQLGGVGCPLGLASTITHGLYKRTPRYPEELELLVSQQSPCGRATSSSRVWWDSSFLGGVVHLEAGEKVVVRVLDERLVRLRDGTRSYFGAFMV

SEQ ID NO: 656 - protein, 596 aa, Artificial Sequence
  Description of Artificial Sequence: Synthetic polypeptide
EVQLVESGGGLVQPGGSLRLSCAASGFTFSDSWIHWVRQAPGKGLEWVAWISPYGGSTYYADSVKGRFTISADTSKNTAYLQMNSLRAEDTAVYYCARRHWPGGFDYWGQGTLVTVSAASTKGPSVFPLAPSSKSTSGGTAALGCLVKDYFPEPVTVSWNSGALTSGVHTFPAVLQSSGLYSLSSVVTVPSSSLGTQTYICNVNHKPSNTKVDKKVEPKSCDKTHTCPPCPAPELLGGPSVFLFPPKPKDTLMISRTPEVTCVVVDVSHEDPEVKFNWYVDGVEVHNAKTKPREEQYASTYRVVSVLTVLHQDWLNGKEYKCKVSNKALPAPIEKTISKAKGQPREPQVYTLPPSREEMTKNQVSLTCLVKGFYPSDIAVEWESNGQPENNYKTTPPVLDSDGSFFLYSKLTVDKSRWQQGNVFSCSVMHEALHNHYTQKSLSLSPGKGGGGSGGGGSGGGGSQVSHRYPRIQSIKVQFTEYKKEKGFILTSQKEDEIMKVQNNSVIINCDGFYLISLKGYFSQEVNISLHYQKDEEPLFQLKKVRSVNSLMVASLTYKDKVYLNVTTDNTSLDDFHVNGGELILIHQNPGEFCVL

SEQ ID NO: 657 - protein, 434 aa, Artificial Sequence
  Description of Artificial Sequence: Synthetic polypeptide
DIQMTQSPSSLSASVGDRVTITCRASQDVSTAVAWYQQKPGKAPKLLIYSASFLYSGVPSRFSGSGSGTDFTLTISSLQPEDFATYYCQQYLYHPATFGQGTKVEIKRTVAAPSVFIFPPSDEQLKSGTASVVCLLNNFYPREAKVQWKVDNALQSGNSQESVTEQDSKDSTYSLSSTLTLSKADYEKHKVYACEVTHQGLSSPVTKSFNRGECGGGGSGGGGSGGGGSACPWAVSGARASPGSAASPRLREGPELSPDDPAGLLDLRQGMFAQLVAQNVLLIDGPLSWYSDPGLAGVSLTGGLSYKEDTKELVVAKAGVYYVFFQLELRRVVAGEGSGSVSLALHLQPLRSAAGAAALALTVDLPPASSEARNSAFGFQGRLLHLSAGQRLGVHLHTEARARHAWQLTQGATVLGLFRVTPEIPAGLPSPRSE

SEQ ID NO: 658 - protein, 401 aa, Artificial Sequence
  Description of Artificial Sequence: Synthetic polypeptide
DIQMTQSPSSLSASVGDRVTITCRASQDVSTAVAWYQQKPGKAPKLLIYSASFLYSGVPSRFSGSGSGTDFTLTISSLQPEDFATYYCQQYLYHPATFGQGTKVEIKRTVAAPSVFIFPPSDEQLKSGTASVVCLLNNFYPREAKVQWKVDNALQSGNSQESVTEQDSKDSTYSLSSTLTLSKADYEKHKVYACEVTHQGLSSPVTKSFNRGECGGGGSGGGGSGGGGSQRTDSIPNSPDNVPLKGGNCSEDLLCILKRAPFKKSWAYLQVAKHLNKTKLSWNKDGILHGVRYQDGNLVIQFPGLYFIICQLQFLVQCPNNSVDLKLELLINKHIKKQALVTVCESGMQTKHVYQNLSQFLLDYLQVNTTISVNVDTFQYIDTSTFPLENVLSIFLYSNSD

SEQ ID NO: 659 - protein, 375 aa, Artificial Sequence
  Description of Artificial Sequence: Synthetic polypeptide
DIQMTQSPSSLSASVGDRVTITCRASQDVSTAVAWYQQKPGKAPKLLIYSASFLYSGVPSRFSGSGSGTDFTLTISSLQPEDFATYYCQQYLYHPATFGQGTKVEIKRTVAAPSVFIFPPSDEQLKSGTASVVCLLNNFYPREAKVQWKVDNALQSGNSQESVTEQDSKDSTYSLSSTLTLSKADYEKHKVYACEVTHQGLSSPVTKSFNRGECGGGGSGGGGSGGGGSGDQNPQIAAHVISEASSKTTSVLQWAEKGYYTMSNNLVTLENGKQLTVKRQGLYYIYAQVTFCSNREASSQAPFIASLCLKSPGRFERILLRAANTHSSAKPCGQQSIHLGGVFELQPGASVFVNVTDPSQVSHGTGFTSFGLLKL

SEQ ID NO: 660 - protein, 384 aa, Artificial Sequence
  Description of Artificial Sequence: Synthetic polypeptide
DIQMTQSPSSLSASVGDRVTITCRASQDVSTAVAWYQQKPGKAPKLLIYSASFLYSGVPSRFSGSGSGTDFTLTISSLQPEDFATYYCQQYLYHPATFGQGTKVEIKRTVAAPSVFIFPPSDEQLKSGTASVVCLLNNFYPREAKVQWKVDNALQSGNSQESVTEQDSKDSTYSLSSTLTLSKADYEKHKVYACEVTHQGLSSPVTKSFNRGECGGGGSGGGGSGGGGSQRFAQAQQQLPLESLGWDVAELQLNHTGPQQDPRLYWQGGPALGRSFLHGPELDKGQLRIHRDGIYMVHIQVTLAICSSTTASRHHPTTLAVGICSPASRSISLLRLSFHQGCTIASQRLTPLARGDTLCTNLTGTLLPSRNTDETFFGVQWVRP

SEQ ID NO: 661 - protein, 357 aa, Artificial Sequence
  Description of Artificial Sequence: Synthetic polypeptide
DIQMTQSPSSLSASVGDRVTITCRASQDVSTAVAWYQQKPGKAPKLLIYSASFLYSGVPSRFSGSGSGTDFTLTISSLQPEDFATYYCQQYLYHPATFGQGTKVEIKRTVAAPSVFIFPPSDEQLKSGTASVVCLLNNFYPREAKVQWKVDNALQSGNSQESVTEQDSKDSTYSLSSTLTLSKADYEKHKVYACEVTHQGLSSPVTKSFNRGECGGGGSGGGGSGGGGSQLETAKEPCMAKFGPLPSKWQMASSEPPCVNKVSDWKLEILQNGLYLIYGQVAPNANYNDVAPFEVRLYKNKDMIQTLTNKSKIQNVGGTYELHVGDTIDLIFNSEHQVLKNNTYWGIILLANPQFIS

SEQ ID NO: 662 - protein, 469 aa, Artificial Sequence
  Description of Artificial Sequence: Synthetic polypeptide
DIQMTQSPSSLSASVGDRVTITCRASQDVSTAVAWYQQKPGKAPKLLIYSASFLYSGVPSRFSGSGSGTDFTLTISSLQPEDFATYYCQQYLYHPATFGQGTKVEIKRTVAAPSVFIFPPSDEQLKSGTASVVCLLNNFYPREAKVQWKVDNALQSGNSQESVTEQDSKDSTYSLSSTLTLSKADYEKHKVYACEVTHQGLSSPVTKSFNRGECGGGGSGGGGSGGGGSDTQEKEVRAMVGSDVELSCACPEGSRFDLNDVYVYWQTSESKTVVTYHIPQNSSLENVDSRYRNRALMSPAGMLRGDFSLRLFNVTPQDEQKFHCLVLSQSLGFQEVLSVEVTLHVAANFSVPVVSAPHSPSQDELTFTCTSINGYPRPNVYWINKTDNSLLDQALQNDTVFLNMRGLYDVVSVLRIARTPSVNIGCCIENVLLQQNLTVGSQTGNDIGERDKITENPVSTGEKNAATWS

SEQ ID NO: 663 - protein, 747 aa, Artificial Sequence
  Description of Artificial Sequence: Synthetic polypeptide
DIQMTQSPSSLSASVGDRVTITCRASQDVSTAVAWYQQKPGKAPKLLIYSASFLYSGVPSRFSGSGSGTDFTLTISSLQPEDFATYYCQQYLYHPATFGQGTKVEIKRTVAAPSVFIFPPSDEQLKSGTASVVCLLNNFYPREAKVQWKVDNALQSGNSQESVTEQDSKDSTYSLSSTLTLSKADYEKHKVYACEVTHQGLSSPVTKSFNRGECGGGGSGGGGSGGGGSIWELKKDVYVVELDWYPDAPGEMVVLTCDTPEEDGITWTLDQSSEVLGSGKTLTIQVKEFGDAGQYTCHKGGEVLSHSLLLLHKKEDGIWSTDILKDQKEPKNKTFLRCEAKNYSGRFTCWWLTTISTDLTFSVKSSRGSSDPQGVTCGAATLSAERVRGDNKEYEYSVECQEDSACPAAEESLPIEVMVDAVHKLKYENYTSSFFIRDIIKPDPPKNLQLKPLKNSRQVEVSWEYPDTWSTPHSYFSLTFCVQVQGKSKREKKDRVFTDKTSATVICRKNASISVRAQDRYYSSSWSEWASVPCSGGGGSGGGGSGGGGSRNLPVATPDPGMFPCLHHSQNLLRAVSNMLQKARQTLEFYPCTSEEIDHEDITKDKTSTVEACLPLELTKNESCLNSRETSFITNGSCLASRKTSFMMALCLSSIYEDLKMYQVEFKTMNAKLLMDPKRQIFLDQNMLAVIDELMQALNFNSETVPQKSSLEEPDFYKTKIKLCILLHAFRIRAVTIDRVMSYLNAS

SEQ ID NO: 664 - protein, 343 aa, Artificial Sequence
  Description of Artificial Sequence: Synthetic polypeptide
DIQMTQSPSSLSASVGDRVTITCRASQDVSTAVAWYQQKPGKAPKLLIYSASFLYSGVPSRFSGSGSGTDFTLTISSLQPEDFATYYCQQYLYHPATFGQGTKVEIKRTVAAPSVFIFPPSDEQLKSGTASVVCLLNNFYPREAKVQWKVDNALQSGNSQESVTEQDSKDSTYSLSSTLTLSKADYEKHKVYACEVTHQGLSSPVTKSFNRGECGGGGSGGGGSGGGGSNWVNVISDLKKIEDLIQSMHIDATLYTESDVHPSCKVTAMKCFLLELQVISLESGDASIHDTVENLIILANNSLSSNGNVTESGCKECEELEEKNIKEFLQSFVHIVQMFINTS

SEQ ID NO: 665 - protein, 396 aa, Artificial Sequence
  Description of Artificial Sequence: Synthetic polypeptide
DIQMTQSPSSLSASVGDRVTITCRASQDVSTAVAWYQQKPGKAPKLLIYSASFLYSGVPSRFSGSGSGTDFTLTISSLQPEDFATYYCQQYLYHPATFGQGTKVEIKRTVAAPSVFIFPPSDEQLKSGTASVVCLLNNFYPREAKVQWKVDNALQSGNSQESVTEQDSKDSTYSLSSTLTLSKADYEKHKVYACEVTHQGLSSPVTKSFNRGECGGGGSGGGGSGGGGSDGPAGSWEQLIQERRSHEVNPAAHLTGANSSLTGSGGPLLWETQLGLAFLRGLSYHDGALVVTKAGYYYIYSKVQLGGVGCPLGLASTITHGLYKRTPRYPEELELLVSQQSPCGRATSSSRVWWDSSFLGGVVHLEAGEKVVVRVLDERLVRLRDGTRSYFGAFMV

SEQ ID NO: 666 - protein, 362 aa, Artificial Sequence
  Description of Artificial Sequence: Synthetic polypeptide
DIQMTQSPSSLSASVGDRVTITCRASQDVSTAVAWYQQKPGKAPKLLIYSASFLYSGVPSRFSGSGSGTDFTLTISSLQPEDFATYYCQQYLYHPATFGQGTKVEIKRTVAAPSVFIFPPSDEQLKSGTASVVCLLNNFYPREAKVQWKVDNALQSGNSQESVTEQDSKDSTYSLSSTLTLSKADYEKHKVYACEVTHQGLSSPVTKSFNRGECGGGGSGGGGSGGGGSQVSHRYPRIQSIKVQFTEYKKEKGFILTSQKEDEIMKVQNNSVIINCDGFYLISLKGYFSQEVNISLHYQKDEEPLFQLKKVRSVNSLMVASLTYKDKVYLNVTTDNTSLDDFHVNGGELILIHQNPGEFCVL

SEQ ID NO: 667 - protein, 669 aa, Artificial Sequence
  Description of Artificial Sequence: Synthetic polypeptide
QVQLKQSGPGLVQPSQSLSITCTVSGFSLTNYGVHWVRQSPGKGLEWLGVIWSGGNTDYNTPFTSRLSINKDNSKSQVFFKMNSLQSNDTAIYYCARALTYYDYEFAYWGQGTLVTVSAASTKGPSVFPLAPSSKSTSGGTAALGCLVKDYFPEPVTVSWNSGALTSGVHTFPAVLQSSGLYSLSSVVTVPSSSLGTQTYICNVNHKPSNTKVDKRVEPKSCDKTHTCPPCPAPELLGGPSVFLFPPKPKDTLMISRTPEVTCVVVDVSHEDPEVKFNWYVDGVEVHNAKTKPREEQYNSTYRVVSVLTVLHQDWLNGKEYKCKVSNKALPAPIEKTISKAKGQPREPQVYTLPPSRDELTKNQVSLTCLVKGFYPSDIAVEWESNGQPENNYKTTPPVLDSDGSFFLYSKLTVDKSRWQQGNVFSCSVMHEALHNHYTQKSLSLSPGKGGGGSGGGGSGGGGSACPWAVSGARASPGSAASPRLREGPELSPDDPAGLLDLRQGMFAQLVAQNVLLIDGPLSWYSDPGLAGVSLTGGLSYKEDTKELVVAKAGVYYVFFQLELRRVVAGEGSGSVSLALHLQPLRSAAGAAALALTVDLPPASSEARNSAFGFQGRLLHLSAGQRLGVHLHTEARARHAWQLTQGATVLGLFRVTPEIPAGLPSPRSE

SEQ ID NO: 668 - protein, 636 aa, Artificial Sequence
  Description of Artificial Sequence: Synthetic polypeptide
QVQLKQSGPGLVQPSQSLSITCTVSGFSLTNYGVHWVRQSPGKGLEWLGVIWSGGNTDYNTPFTSRLSINKDNSKSQVFFKMNSLQSNDTAIYYCARALTYYDYEFAYWGQGTLVTVSAASTKGPSVFPLAPSSKSTSGGTAALGCLVKDYFPEPVTVSWNSGALTSGVHTFPAVLQSSGLYSLSSVVTVPSSSLGTQTYICNVNHKPSNTKVDKRVEPKSCDKTHTCPPCPAPELLGGPSVFLFPPKPKDTLMISRTPEVTCVVVDVSHEDPEVKFNWYVDGVEVHNAKTKPREEQYNSTYRVVSVLTVLHQDWLNGKEYKCKVSNKALPAPIEKTISKAKGQPREPQVYTLPPSRDELTKNQVSLTCLVKGFYPSDIAVEWESNGQPENNYKTTPPVLDSDGSFFLYSKLTVDKSRWQQGNVFSCSVMHEALHNHYTQKSLSLSPGKGGGGSGGGGSGGGGSQRTDSIPNSPDNVPLKGGNCSEDLLCILKRAPFKKSWAYLQVAKHLNKTKLSWNKDGILHGVRYQDGNLVIQFPGLYFIICQLQFLVQCPNNSVDLKLELLINKHIKKQALVTVCESGMQTKHVYQNLSQFLLDYLQVNTTISVNVDTFQYIDTSTFPLENVLSIFLYSNSD

SEQ ID NO: 669 - protein, 610 aa, Artificial Sequence
  Description of Artificial Sequence: Synthetic polypeptide
QVQLKQSGPGLVQPSQSLSITCTVSGFSLTNYGVHWVRQSPGKGLEWLGVIWSGGNTDYNTPFTSRLSINKDNSKSQVFFKMNSLQSNDTAIYYCARALTYYDYEFAYWGQGTLVTVSAASTKGPSVFPLAPSSKSTSGGTAALGCLVKDYFPEPVTVSWNSGALTSGVHTFPAVLQSSGLYSLSSVVTVPSSSLGTQTYICNVNHKPSNTKVDKRVEPKSCDKTHTCPPCPAPELLGGPSVFLFPPKPKDTLMISRTPEVTCVVVDVSHEDPEVKFNWYVDGVEVHNAKTKPREEQYNSTYRVVSVLTVLHQDWLNGKEYKCKVSNKALPAPIEKTISKAKGQPREPQVYTLPPSRDELTKNQVSLTCLVKGFYPSDIAVEWESNGQPENNYKTTPPVLDSDGSFFLYSKLTVDKSRWQQGNVFSCSVMHEALHNHYTQKSLSLSPGKGGGGSGGGGSGGGGSGDQNPQIAAHVISEASSKTTSVLQWAEKGYYTMSNNLVTLENGKQLTVKRQGLYYIYAQVTFCSNREASSQAPFIASLCLKSPGRFERILLRAANTHSSAKPCGQQSIHLGGVFELQPGASVFVNVTDPSQVSHGTGFTSFGLLKL

SEQ ID NO: 670 - protein, 619 aa, Artificial Sequence
  Description of Artificial Sequence: Synthetic polypeptide
QVQLKQSGPGLVQPSQSLSITCTVSGFSLTNYGVHWVRQSPGKGLEWLGVIWSGGNTDYNTPFTSRLSINKDNSKSQVFFKMNSLQSNDTAIYYCARALTYYDYEFAYWGQGTLVTVSAASTKGPSVFPLAPSSKSTSGGTAALGCLVKDYFPEPVTVSWNSGALTSGVHTFPAVLQSSGLYSLSSVVTVPSSSLGTQTYICNVNHKPSNTKVDKRVEPKSCDKTHTCPPCPAPELLGGPSVFLFPPKPKDTLMISRTPEVTCVVVDVSHEDPEVKFNWYVDGVEVHNAKTKPREEQYNSTYRVVSVLTVLHQDWLNGKEYKCKVSNKALPAPIEKTISKAKGQPREPQVYTLPPSRDELTKNQVSLTCLVKGFYPSDIAVEWESNGQPENNYKTTPPVLDSDGSFFLYSKLTVDKSRWQQGNVFSCSVMHEALHNHYTQKSLSLSPGKGGGGSGGGGSGGGGSQRFAQAQQQLPLESLGWDVAELQLNHTGPQQDPRLYWQGGPALGRSFLHGPELDKGQLRIHRDGIYMVHIQVTLAICSSTTASRHHPTTLAVGICSPASRSISLLRLSFHQGCTIASQRLTPLARGDTLCTNLTGTLLPSRNTDETFFGVQWVRP

SEQ ID NO: 671 - protein, 592 aa, Artificial Sequence
  Description of Artificial Sequence: Synthetic polypeptide
QVQLKQSGPGLVQPSQSLSITCTVSGFSLTNYGVHWVRQSPGKGLEWLGVIWSGGNTDYNTPFTSRLSINKDNSKSQVFFKMNSLQSNDTAIYYCARALTYYDYEFAYWGQGTLVTVSAASTKGPSVFPLAPSSKSTSGGTAALGCLVKDYFPEPVTVSWNSGALTSGVHTFPAVLQSSGLYSLSSVVTVPSSSLGTQTYICNVNHKPSNTKVDKRVEPKSCDKTHTCPPCPAPELLGGPSVFLFPPKPKDTLMISRTPEVTCVVVDVSHEDPEVKFNWYVDGVEVHNAKTKPREEQYNSTYRVVSVLTVLHQDWLNGKEYKCKVSNKALPAPIEKTISKAKGQPREPQVYTLPPSRDELTKNQVSLTCLVKGFYPSDIAVEWESNGQPENNYKTTPPVLDSDGSFFLYSKLTVDKSRWQQGNVFSCSVMHEALHNHYTQKSLSLSPGKGGGGSGGGGSGGGGSQLETAKEPCMAKFGPLPSKWQMASSEPPCVNKVSDWKLEILQNGLYLIYGQVAPNANYNDVAPFEVRLYKNKDMIQTLTNKSKIQNVGGTYELHVGDTIDLIFNSEHQVLKNNTYWGIILLANPQFIS

SEQ ID NO: 672 - protein, 704 aa, Artificial Sequence
  Description of Artificial Sequence: Synthetic polypeptide
QVQLKQSGPGLVQPSQSLSITCTVSGFSLTNYGVHWVRQSPGKGLEWLGVIWSGGNTDYNTPFTSRLSINKDNSKSQVFFKMNSLQSNDTAIYYCARALTYYDYEFAYWGQGTLVTVSAASTKGPSVFPLAPSSKSTSGGTAALGCLVKDYFPEPVTVSWNSGALTSGVHTFPAVLQSSGLYSLSSVVTVPSSSLGTQTYICNVNHKPSNTKVDKRVEPKSCDKTHTCPPCPAPELLGGPSVFLFPPKPKDTLMISRTPEVTCVVVDVSHEDPEVKFNWYVDGVEVHNAKTKPREEQYNSTYRVVSVLTVLHQDWLNGKEYKCKVSNKALPAPIEKTISKAKGQPREPQVYTLPPSRDELTKNQVSLTCLVKGFYPSDIAVEWESNGQPENNYKTTPPVLDSDGSFFLYSKLTVDKSRWQQGNVFSCSVMHEALHNHYTQKSLSLSPGKGGGGSGGGGSGGGGSDTQEKEVRAMVGSDVELSCACPEGSRFDLNDVYVYWQTSESKTVVTYHIPQNSSLENVDSRYRNRALMSPAGMLRGDFSLRLFNVTPQDEQKFHCLVLSQSLGFQEVLSVEVTLHVAANFSVPVVSAPHSPSQDELTFTCTSINGYPRPNVYWINKTDNSLLDQALQNDTVFLNMRGLYDVVSVLRIARTPSVNIGCCIENVLLQQNLTVGSQTGNDIGERDKITENPVSTGEKNAATWS

SEQ ID NO: 673 - protein, 982 aa, Artificial Sequence
  Description of Artificial Sequence: Synthetic polypeptide
QVQLKQSGPGLVQPSQSLSITCTVSGFSLTNYGVHWVRQSPGKGLEWLGVIWSGGNTDYNTPFTSRLSINKDNSKSQVFFKMNSLQSNDTAIYYCARALTYYDYEFAYWGQGTLVTVSAASTKGPSVFPLAPSSKSTSGGTAALGCLVKDYFPEPVTVSWNSGALTSGVHTFPAVLQSSGLYSLSSVVTVPSSSLGTQTYICNVNHKPSNTKVDKRVEPKSCDKTHTCPPCPAPELLGGPSVFLFPPKPKDTLMISRTPEVTCVVVDVSHEDPEVKFNWYVDGVEVHNAKTKPREEQYNSTYRVVSVLTVLHQDWLNGKEYKCKVSNKALPAPIEKTISKAKGQPREPQVYTLPPSRDELTKNQVSLTCLVKGFYPSDIAVEWESNGQPENNYKTTPPVLDSDGSFFLYSKLTVDKSRWQQGNVFSCSVMHEALHNHYTQKSLSLSPGKGGGGSGGGGSGGGGSIWELKKDVYVVELDWYPDAPGEMVVLTCDTPEEDGITWTLDQSSEVLGSGKTLTIQVKEFGDAGQYTCHKGGEVLSHSLLLLHKKEDGIWSTDILKDQKEPKNKTFLRCEAKNYSGRFTCWWLTTISTDLTFSVKSSRGSSDPQGVTCGAATLSAERVRGDNKEYEYSVECQEDSACPAAEESLPIEVMVDAVHKLKYENYTSSFFIRDIIKPDPPKNLQLKPLKNSRQVEVSWEYPDTWSTPHSYFSLTFCVQVQGKSKREKKDRVFTDKTSATVICRKNASISVRAQDRYYSSSWSEWASVPCSGGGGSGGGGSGGGGSRNLPVATPDPGMFPCLHHSQNLLRAVSNMLQKARQTLEFYPCTSEEIDHEDITKDKTSTVEACLPLELTKNESCLNSRETSFITNGSCLASRKTSFMMALCLSSIYEDLKMYQVEFKTMNAKLLMDPKRQIFLDQNMLAVIDELMQALNFNSETVPQKSSLEEPDFYKTKIKLCILLHAFRIRAVTIDRVMSYLNAS

SEQ ID NO: 674 - protein, 578 aa, Artificial Sequence
  Description of Artificial Sequence: Synthetic polypeptide
QVQLKQSGPGLVQPSQSLSITCTVSGFSLTNYGVHWVRQSPGKGLEWLGVIWSGGNTDYNTPFTSRLSINKDNSKSQVFFKMNSLQSNDTAIYYCARALTYYDYEFAYWGQGTLVTVSAASTKGPSVFPLAPSSKSTSGGTAALGCLVKDYFPEPVTVSWNSGALTSGVHTFPAVLQSSGLYSLSSVVTVPSSSLGTQTYICNVNHKPSNTKVDKRVEPKSCDKTHTCPPCPAPELLGGPSVFLFPPKPKDTLMISRTPEVTCVVVDVSHEDPEVKFNWYVDGVEVHNAKTKPREEQYNSTYRVVSVLTVLHQDWLNGKEYKCKVSNKALPAPIEKTISKAKGQPREPQVYTLPPSRDELTKNQVSLTCLVKGFYPSDIAVEWESNGQPENNYKTTPPVLDSDGSFFLYSKLTVDKSRWQQGNVFSCSVMHEALHNHYTQKSLSLSPGKGGGGSGGGGSGGGGSNWVNVISDLKKIEDLIQSMHIDATLYTESDVHPSCKVTAMKCFLLELQVISLESGDASIHDTVENLIILANNSLSSNGNVTESGCKECEELEEKNIKEFLQSFVHIVQMFINTS

SEQ ID NO: 675 - protein, 631 aa, Artificial Sequence
  Description of Artificial Sequence: Synthetic polypeptide
QVQLKQSGPGLVQPSQSLSITCTVSGFSLTNYGVHWVRQSPGKGLEWLGVIWSGGNTDYNTPFTSRLSINKDNSKSQVFFKMNSLQSNDTAIYYCARALTYYDYEFAYWGQGTLVTVSAASTKGPSVFPLAPSSKSTSGGTAALGCLVKDYFPEPVTVSWNSGALTSGVHTFPAVLQSSGLYSLSSVVTVPSSSLGTQTYICNVNHKPSNTKVDKRVEPKSCDKTHTCPPCPAPELLGGPSVFLFPPKPKDTLMISRTPEVTCVVVDVSHEDPEVKFNWYVDGVEVHNAKTKPREEQYNSTYRVVSVLTVLHQDWLNGKEYKCKVSNKALPAPIEKTISKAKGQPREPQVYTLPPSRDELTKNQVSLTCLVKGFYPSDIAVEWESNGQPENNYKTTPPVLDSDGSFFLYSKLTVDKSRWQQGNVFSCSVMHEALHNHYTQKSLSLSPGKGGGGSGGGGSGGGGSDGPAGSWEQLIQERRSHEVNPAAHLTGANSSLTGSGGPLLWETQLGLAFLRGLSYHDGALVVTKAGYYYIYSKVQLGGVGCPLGLASTITHGLYKRTPRYPEELELLVSQQSPCGRATSSSRVWWDSSFLGGVVHLEAGEKVVVRVLDERLVRLRDGTRSYFGAFMV

SEQ ID NO: 676 - protein, 597 aa, Artificial Sequence
  Description of Artificial Sequence: Synthetic polypeptide
QVQLKQSGPGLVQPSQSLSITCTVSGFSLTNYGVHWVRQSPGKGLEWLGVIWSGGNTDYNTPFTSRLSINKDNSKSQVFFKMNSLQSNDTAIYYCARALTYYDYEFAYWGQGTLVTVSAASTKGPSVFPLAPSSKSTSGGTAALGCLVKDYFPEPVTVSWNSGALTSGVHTFPAVLQSSGLYSLSSVVTVPSSSLGTQTYICNVNHKPSNTKVDKRVEPKSCDKTHTCPPCPAPELLGGPSVFLFPPKPKDTLMISRTPEVTCVVVDVSHEDPEVKFNWYVDGVEVHNAKTKPREEQYNSTYRVVSVLTVLHQDWLNGKEYKCKVSNKALPAPIEKTISKAKGQPREPQVYTLPPSRDELTKNQVSLTCLVKGFYPSDIAVEWESNGQPENNYKTTPPVLDSDGSFFLYSKLTVDKSRWQQGNVFSCSVMHEALHNHYTQKSLSLSPGKGGGGSGGGGSGGGGSQVSHRYPRIQSIKVQFTEYKKEKGFILTSQKEDEIMKVQNNSVIINCDGFYLISLKGYFSQEVNISLHYQKDEEPLFQLKKVRSVNSLMVASLTYKDKVYLNVTTDNTSLDDFHVNGGELILIHQNPGEFCVL

SEQ ID NO: 677 - protein, 434 aa, Artificial Sequence
  Description of Artificial Sequence: Synthetic polypeptide
DILLTQSPVILSVSPGERVSFSCRASQSIGTNIHWYQQRTNGSPRLLIKYASESISGIPSRFSGSGSGTDFTLSINSVESEDIADYYCQQNNNWPTTFGAGTKLELKRTVAAPSVFIFPPSDEQLKSGTASVVCLLNNFYPREAKVQWKVDNALQSGNSQESVTEQDSKDSTYSLSSTLTLSKADYEKHKVYACEVTHQGLSSPVTKSFNRGECGGGGSGGGGSGGGGSACPWAVSGARASPGSAASPRLREGPELSPDDPAGLLDLRQGMFAQLVAQNVLLIDGPLSWYSDPGLAGVSLTGGLSYKEDTKELVVAKAGVYYVFFQLELRRVVAGEGSGSVSLALHLQPLRSAAGAAALALTVDLPPASSEARNSAFGFQGRLLHLSAGQRLGVHLHTEARARHAWQLTQGATVLGLFRVTPEIPAGLPSPRSE

SEQ ID NO: 678 - protein, 401 aa, Artificial Sequence
  Description of Artificial Sequence: Synthetic polypeptide
DILLTQSPVILSVSPGERVSFSCRASQSIGTNIHWYQQRTNGSPRLLIKYASESISGIPSRFSGSGSGTDFTLSINSVESEDIADYYCQQNNNWPTTFGAGTKLELKRTVAAPSVFIFPPSDEQLKSGTASVVCLLNNFYPREAKVQWKVDNALQSGNSQESVTEQDSKDSTYSLSSTLTLSKADYEKHKVYACEVTHQGLSSPVTKSFNRGECGGGGSGGGGSGGGGSQRTDSIPNSPDNVPLKGGNCSEDLLCILKRAPFKKSWAYLQVAKHLNKTKLSWNKDGILHGVRYQDGNLVIQFPGLYFIICQLQFLVQCPNNSVDLKLELLINKHIKKQALVTVCESGMQTKHVYQNLSQFLLDYLQVNTTISVNVDTFQYIDTSTFPLENVLSIFLYSNSD

SEQ ID NO: 679 - protein, 375 aa, Artificial Sequence
  Description of Artificial Sequence: Synthetic polypeptide
DILLTQSPVILSVSPGERVSFSCRASQSIGTNIHWYQQRTNGSPRLLIKYASESISGIPSRFSGSGSGTDFTLSINSVESEDIADYYCQQNNNWPTTFGAGTKLELKRTVAAPSVFIFPPSDEQLKSGTASVVCLLNNFYPREAKVQWKVDNALQSGNSQESVTEQDSKDSTYSLSSTLTLSKADYEKHKVYACEVTHQGLSSPVTKSFNRGECGGGGSGGGGSGGGGSGDQNPQIAAHVISEASSKTTSVLQWAEKGYYTMSNNLVTLENGKQLTVKRQGLYYIYAQVTFCSNREASSQAPFIASLCLKSPGRFERILLRAANTHSSAKPCGQQSIHLGGVFELQPGASVFVNVTDPSQVSHGTGFTSFGLLKL

SEQ ID NO: 680 - protein, 384 aa, Artificial Sequence
  Description of Artificial Sequence: Synthetic polypeptide
DILLTQSPVILSVSPGERVSFSCRASQSIGTNIHWYQQRTNGSPRLLIKYASESISGIPSRFSGSGSGTDFTLSINSVESEDIADYYCQQNNNWPTTFGAGTKLELKRTVAAPSVFIFPPSDEQLKSGTASVVCLLNNFYPREAKVQWKVDNALQSGNSQESVTEQDSKDSTYSLSSTLTLSKADYEKHKVYACEVTHQGLSSPVTKSFNRGECGGGGSGGGGSGGGGSQRFAQAQQQLPLESLGWDVAELQLNHTGPQQDPRLYWQGGPALGRSFLHGPELDKGQLRIHRDGIYMVHIQVTLAICSSTTASRHHPTTLAVGICSPASRSISLLRLSFHQGCTIASQRLTPLARGDTLCTNLTGTLLPSRNTDETFFGVQWVRP

SEQ ID NO: 681 - protein, 357 aa, Artificial Sequence
  Description of Artificial Sequence: Synthetic polypeptide
DILLTQSPVILSVSPGERVSFSCRASQSIGTNIHWYQQRTNGSPRLLIKYASESISGIPSRFSGSGSGTDFTLSINSVESEDIADYYCQQNNNWPTTFGAGTKLELKRTVAAPSVFIFPPSDEQLKSGTASVVCLLNNFYPREAKVQWKVDNALQSGNSQESVTEQDSKDSTYSLSSTLTLSKADYEKHKVYACEVTHQGLSSPVTKSFNRGECGGGGSGGGGSGGGGSQLETAKEPCMAKFGPLPSKWQMASSEPPCVNKVSDWKLEILQNGLYLIYGQVAPNANYNDVAPFEVRLYKNKDMIQTLTNKSKIQNVGGTYELHVGDTIDLIFNSEHQVLKNNTYWGIILLANPQFIS

SEQ ID NO: 682 - protein, 469 aa, Artificial Sequence
  Description of Artificial Sequence: Synthetic polypeptide
DILLTQSPVILSVSPGERVSFSCRASQSIGTNIHWYQQRTNGSPRLLIKYASESISGIPSRFSGSGSGTDFTLSINSVESEDIADYYCQQNNNWPTTFGAGTKLELKRTVAAPSVFIFPPSDEQLKSGTASVVCLLNNFYPREAKVQWKVDNALQSGNSQESVTEQDSKDSTYSLSSTLTLSKADYEKHKVYACEVTHQGLSSPVTKSFNRGECGGGGSGGGGSGGGGSDTQEKEVRAMVGSDVELSCACPEGSRFDLNDVYVYWQTSESKTVVTYHIPQNSSLENVDSRYRNRALMSPAGMLRGDFSLRLFNVTPQDEQKFHCLVLSQSLGFQEVLSVEVTLHVAANFSVPVVSAPHSPSQDELTFTCTSINGYPRPNVYWINKTDNSLLDQALQNDTVFLNMRGLYDVVSVLRIARTPSVNIGCCIENVLLQQNLTVGSQTGNDIGERDKITENPVSTGEKNAATWS

SEQ ID NO: 683 - protein, 747 aa, Artificial Sequence
  Description of Artificial Sequence: Synthetic polypeptide
DILLTQSPVILSVSPGERVSFSCRASQSIGTNIHWYQQRTNGSPRLLIKYASESISGIPSRFSGSGSGTDFTLSINSVESEDIADYYCQQNNNWPTTFGAGTKLELKRTVAAPSVFIFPPSDEQLKSGTASVVCLLNNFYPREAKVQWKVDNALQSGNSQESVTEQDSKDSTYSLSSTLTLSKADYEKHKVYACEVTHQGLSSPVTKSFNRGECGGGGSGGGGSGGGGSIWELKKDVYVVELDWYPDAPGEMVVLTCDTPEEDGITWTLDQSSEVLGSGKTLTIQVKEFGDAGQYTCHKGGEVLSHSLLLLHKKEDGIWSTDILKDQKEPKNKTFLRCEAKNYSGRFTCWWLTTISTDLTFSVKSSRGSSDPQGVTCGAATLSAERVRGDNKEYEYSVECQEDSACPAAEESLPIEVMVDAVHKLKYENYTSSFFIRDIIKPDPPKNLQLKPLKNSRQVEVSWEYPDTWSTPHSYFSLTFCVQVQGKSKREKKDRVFTDKTSATVICRKNASISVRAQDRYYSSSWSEWASVPCSGGGGSGGGGSGGGGSRNLPVATPDPGMFPCLHHSQNLLRAVSNMLQKARQTLEFYPCTSEEIDHEDITKDKTSTVEACLPLELTKNESCLNSRETSFITNGSCLASRKTSFMMALCLSSIYEDLKMYQVEFKTMNAKLLMDPKRQIFLDQNMLAVIDELMQALNFNSETVPQKSSLEEPDFYKTKIKLCILLHAFRIRAVTIDRVMSYLNAS

SEQ ID NO: 684 - protein, 343 aa, Artificial Sequence
  Description of Artificial Sequence: Synthetic polypeptide
DILLTQSPVILSVSPGERVSFSCRASQSIGTNIHWYQQRTNGSPRLLIKYASESISGIPSRFSGSGSGTDFTLSINSVESEDIADYYCQQNNNWPTTFGAGTKLELKRTVAAPSVFIFPPSDEQLKSGTASVVCLLNNFYPREAKVQWKVDNALQSGNSQESVTEQDSKDSTYSLSSTLTLSKADYEKHKVYACEVTHQGLSSPVTKSFNRGECGGGGSGGGGSGGGGSNWVNVISDLKKIEDLIQSMHIDATLYTESDVHPSCKVTAMKCFLLELQVISLESGDASIHDTVENLIILANNSLSSNGNVTESGCKECEELEEKNIKEFLQSFVHIVQMFINTS

SEQ ID NO: 685 - protein, 396 aa, Artificial Sequence
  Description of Artificial Sequence: Synthetic polypeptide
DILLTQSPVILSVSPGERVSFSCRASQSIGTNIHWYQQRTNGSPRLLIKYASESISGIPSRFSGSGSGTDFTLSINSVESEDIADYYCQQNNNWPTTFGAGTKLELKRTVAAPSVFIFPPSDEQLKSGTASVVCLLNNFYPREAKVQWKVDNALQSGNSQESVTEQDSKDSTYSLSSTLTLSKADYEKHKVYACEVTHQGLSSPVTKSFNRGECGGGGSGGGGSGGGGSDGPAGSWEQLIQERRSHEVNPAAHLTGANSSLTGSGGPLLWETQLGLAFLRGLSYHDGALVVTKAGYYYIYSKVQLGGVGCPLGLASTITHGLYKRTPRYPEELELLVSQQSPCGRATSSSRVWWDSSFLGGVVHLEAGEKVVVRVLDERLVRLRDGTRSYFGAFMV

SEQ ID NO: 686 - protein, 362 aa, Artificial Sequence
  Description of Artificial Sequence: Synthetic polypeptide
DILLTQSPVILSVSPGERVSFSCRASQSIGTNIHWYQQRTNGSPRLLIKYASESISGIPSRFSGSGSGTDFTLSINSVESEDIADYYCQQNNNWPTTFGAGTKLELKRTVAAPSVFIFPPSDEQLKSGTASVVCLLNNFYPREAKVQWKVDNALQSGNSQESVTEQDSKDSTYSLSSTLTLSKADYEKHKVYACEVTHQGLSSPVTKSFNRGECGGGGSGGGGSGGGGSQVSHRYPRIQSIKVQFTEYKKEKGFILTSQKEDEIMKVQNNSVIINCDGFYLISLKGYFSQEVNISLHYQKDEEPLFQLKKVRSVNSLMVASLTYKDKVYLNVTTDNTSLDDFHVNGGELILIHQNPGEFCVL

SEQ ID NO: 687 - protein, 662 aa, Artificial Sequence
  Description of Artificial Sequence: Synthetic polypeptide
QVQLVQSGAEVKKPGASVKVSCKASGYTFTRYGISWVRQAPGQGLEWMGWISTYSGNTNYAQKLQGRVTMTTDTSTSTAYMELRSLRSDDTAVYYCARRQLYFDYWGQGTLVTVSSASTKGPSVFPLAPCSRSTSESTAALGCLVKDYFPEPVTVSWNSGALTSGVHTFPAVLQSSGLYSLSSVVTVPSSNFGTQTYTCNVDHKPSNTKVDKTVERKCCVECPPCPAPPVAGPSVFLFPPKPKDTLMISRTPEVTCVVVDVSHEDPEVQFNWYVDGVEVHNAKTKPREEQFNSTFRVVSVLTVVHQDWLNGKEYKCKVSNKGLPAPIEKTISKTKGQPREPQVYTLPPSREEMTKNQVSLTCLVKGFYPSDIAVEWESNGQPENNYKTTPPMLDSDGSFFLYSKLTVDKSRWQQGNVFSCSVMHEALHNHYTQKSLSLSPGKGGGGSGGGGSGGGGSACPWAVSGARASPGSAASPRLREGPELSPDDPAGLLDLRQGMFAQLVAQNVLLIDGPLSWYSDPGLAGVSLTGGLSYKEDTKELVVAKAGVYYVFFQLELRRVVAGEGSGSVSLALHLQPLRSAAGAAALALTVDLPPASSEARNSAFGFQGRLLHLSAGQRLGVHLHTEARARHAWQLTQGATVLGLFRVTPEIPAGLPSPRSE

SEQ ID NO: 688 - protein, 629 aa, Artificial Sequence
  Description of Artificial Sequence: Synthetic polypeptide
QVQLVQSGAEVKKPGASVKVSCKASGYTFTRYGISWVRQAPGQGLEWMGWISTYSGNTNYAQKLQGRVTMTTDTSTSTAYMELRSLRSDDTAVYYCARRQLYFDYWGQGTLVTVSSASTKGPSVFPLAPCSRSTSESTAALGCLVKDYFPEPVTVSWNSGALTSGVHTFPAVLQSSGLYSLSSVVTVPSSNFGTQTYTCNVDHKPSNTKVDKTVERKCCVECPPCPAPPVAGPSVFLFPPKPKDTLMISRTPEVTCVVVDVSHEDPEVQFNWYVDGVEVHNAKTKPREEQFNSTFRVVSVLTVVHQDWLNGKEYKCKVSNKGLPAPIEKTISKTKGQPREPQVYTLPPSREEMTKNQVSLTCLVKGFYPSDIAVEWESNGQPENNYKTTPPMLDSDGSFFLYSKLTVDKSRWQQGNVFSCSVMHEALHNHYTQKSLSLSPGKGGGGSGGGGSGGGGSQRTDSIPNSPDNVPLKGGNCSEDLLCILKRAPFKKSWAYLQVAKHLNKTKLSWNKDGILHGVRYQDGNLVIQFPGLYFIICQLQFLVQCPNNSVDLKLELLINKHIKKQALVTVCESGMQTKHVYQNLSQFLLDYLQVNTTISVNVDTFQYIDTSTFPLENVLSIFLYSNSD

SEQ ID NO: 689 - protein, 603 aa, Artificial Sequence
  Description of Artificial Sequence: Synthetic polypeptide
QVQLVQSGAEVKKPGASVKVSCKASGYTFTRYGISWVRQAPGQGLEWMGWISTYSGNTNYAQKLQGRVTMTTDTSTSTAYMELRSLRSDDTAVYYCARRQLYFDYWGQGTLVTVSSASTKGPSVFPLAPCSRSTSESTAALGCLVKDYFPEPVTVSWNSGALTSGVHTFPAVLQSSGLYSLSSVVTVPSSNFGTQTYTCNVDHKPSNTKVDKTVERKCCVECPPCPAPPVAGPSVFLFPPKPKDTLMISRTPEVTCVVVDVSHEDPEVQFNWYVDGVEVHNAKTKPREEQFNSTFRVVSVLTVVHQDWLNGKEYKCKVSNKGLPAPIEKTISKTKGQPREPQVYTLPPSREEMTKNQVSLTCLVKGFYPSDIAVEWESNGQPENNYKTTPPMLDSDGSFFLYSKLTVDKSRWQQGNVFSCSVMHEALHNHYTQKSLSLSPGKGGGGSGGGGSGGGGSGDQNPQIAAHVISEASSKTTSVLQWAEKGYYTMSNNLVTLENGKQLTVKRQGLYYIYAQVTFCSNREASSQAPFIASLCLKSPGRFERILLRAANTHSSAKPCGQQSIHLGGVFELQPGASVFVNVTDPSQVSHGTGFTSFGLLKL

SEQ ID NO: 690 - protein, 612 aa, Artificial Sequence
  Description of Artificial Sequence: Synthetic polypeptide
QVQLVQSGAEVKKPGASVKVSCKASGYTFTRYGISWVRQAPGQGLEWMGWISTYSGNTNYAQKLQGRVTMTTDTSTSTAYMELRSLRSDDTAVYYCARRQLYFDYWGQGTLVTVSSASTKGPSVFPLAPCSRSTSESTAALGCLVKDYFPEPVTVSWNSGALTSGVHTFPAVLQSSGLYSLSSVVTVPSSNFGTQTYTCNVDHKPSNTKVDKTVERKCCVECPPCPAPPVAGPSVFLFPPKPKDTLMISRTPEVTCVVVDVSHEDPEVQFNWYVDGVEVHNAKTKPREEQFNSTFRVVSVLTVVHQDWLNGKEYKCKVSNKGLPAPIEKTISKTKGQPREPQVYTLPPSREEMTKNQVSLTCLVKGFYPSDIAVEWESNGQPENNYKTTPPMLDSDGSFFLYSKLTVDKSRWQQGNVFSCSVMHEALHNHYTQKSLSLSPGKGGGGSGGGGSGGGGSQRFAQAQQQLPLESLGWDVAELQLNHTGPQQDPRLYWQGGPALGRSFLHGPELDKGQLRIHRDGIYMVHIQVTLAICSSTTASRHHPTTLAVGICSPASRSISLLRLSFHQGCTIASQRLTPLARGDTLCTNLTGTLLPSRNTDETFFGVQWVRP

SEQ ID NO: 691 - protein, 585 aa, Artificial Sequence
  Description of Artificial Sequence: Synthetic polypeptide
QVQLVQSGAEVKKPGASVKVSCKASGYTFTRYGISWVRQAPGQGLEWMGWISTYSGNTNYAQKLQGRVTMTTDTSTSTAYMELRSLRSDDTAVYYCARRQLYFDYWGQGTLVTVSSASTKGPSVFPLAPCSRSTSESTAALGCLVKDYFPEPVTVSWNSGALTSGVHTFPAVLQSSGLYSLSSVVTVPSSNFGTQTYTCNVDHKPSNTKVDKTVERKCCVECPPCPAPPVAGPSVFLFPPKPKDTLMISRTPEVTCVVVDVSHEDPEVQFNWYVDGVEVHNAKTKPREEQFNSTFRVVSVLTVVHQDWLNGKEYKCKVSNKGLPAPIEKTISKTKGQPREPQVYTLPPSREEMTKNQVSLTCLVKGFYPSDIAVEWESNGQPENNYKTTPPMLDSDGSFFLYSKLTVDKSRWQQGNVFSCSVMHEALHNHYTQKSLSLSPGKGGGGSGGGGSGGGGSQLETAKEPCMAKFGPLPSKWQMASSEPPCVNKVSDWKLEILQNGLYLIYGQVAPNANYNDVAPFEVRLYKNKDMIQTLTNKSKIQNVGGTYELHVGDTIDLIFNSEHQVLKNNTYWGIILLANPQFIS

SEQ ID NO: 692 - protein, 697 aa, Artificial Sequence
  Description of Artificial Sequence: Synthetic polypeptide
QVQLVQSGAEVKKPGASVKVSCKASGYTFTRYGISWVRQAPGQGLEWMGWISTYSGNTNYAQKLQGRVTMTTDTSTSTAYMELRSLRSDDTAVYYCARRQLYFDYWGQGTLVTVSSASTKGPSVFPLAPCSRSTSESTAALGCLVKDYFPEPVTVSWNSGALTSGVHTFPAVLQSSGLYSLSSVVTVPSSNFGTQTYTCNVDHKPSNTKVDKTVERKCCVECPPCPAPPVAGPSVFLFPPKPKDTLMISRTPEVTCVVVDVSHEDPEVQFNWYVDGVEVHNAKTKPREEQFNSTFRVVSVLTVVHQDWLNGKEYKCKVSNKGLPAPIEKTISKTKGQPREPQVYTLPPSREEMTKNQVSLTCLVKGFYPSDIAVEWESNGQPENNYKTTPPMLDSDGSFFLYSKLTVDKSRWQQGNVFSCSVMHEALHNHYTQKSLSLSPGKGGGGSGGGGSGGGGSDTQEKEVRAMVGSDVELSCACPEGSRFDLNDVYVYWQTSESKTVVTYHIPQNSSLENVDSRYRNRALMSPAGMLRGDFSLRLFNVTPQDEQKFHCLVLSQSLGFQEVLSVEVTLHVAANFSVPVVSAPHSPSQDELTFTCTSINGYPRPNVYWINKTDNSLLDQALQNDTVFLNMRGLYDVVSVLRIARTPSVNIGCCIENVLLQQNLTVGSQTGNDIGERDKITENPVSTGEKNAATWS

SEQ ID NO: 693 - protein, 975 aa, Artificial Sequence
  Description of Artificial Sequence: Synthetic polypeptide
QVQLVQSGAEVKKPGASVKVSCKASGYTFTRYGISWVRQAPGQGLEWMGWISTYSGNTNYAQKLQGRVTMTTDTSTSTAYMELRSLRSDDTAVYYCARRQLYFDYWGQGTLVTVSSASTKGPSVFPLAPCSRSTSESTAALGCLVKDYFPEPVTVSWNSGALTSGVHTFPAVLQSSGLYSLSSVVTVPSSNFGTQTYTCNVDHKPSNTKVDKTVERKCCVECPPCPAPPVAGPSVFLFPPKPKDTLMISRTPEVTCVVVDVSHEDPEVQFNWYVDGVEVHNAKTKPREEQFNSTFRVVSVLTVVHQDWLNGKEYKCKVSNKGLPAPIEKTISKTKGQPREPQVYTLPPSREEMTKNQVSLTCLVKGFYPSDIAVEWESNGQPENNYKTTPPMLDSDGSFFLYSKLTVDKSRWQQGNVFSCSVMHEALHNHYTQKSLSLSPGKGGGGSGGGGSGGGGSIWELKKDVYVVELDWYPDAPGEMVVLTCDTPEEDGITWTLDQSSEVLGSGKTLTIQVKEFGDAGQYTCHKGGEVLSHSLLLLHKKEDGIWSTDILKDQKEPKNKTFLRCEAKNYSGRFTCWWLTTISTDLTFSVKSSRGSSDPQGVTCGAATLSAERVRGDNKEYEYSVECQEDSACPAAEESLPIEVMVDAVHKLKYENYTSSFFIRDIIKPDPPKNLQLKPLKNSRQVEVSWEYPDTWSTPHSYFSLTFCVQVQGKSKREKKDRVFTDKTSATVICRKNASISVRAQDRYYSSSWSEWASVPCSGGGGSGGGGSGGGGSRNLPVATPDPGMFPCLHHSQNLLRAVSNMLQKARQTLEFYPCTSEEIDHEDITKDKTSTVEACLPLELTKNESCLNSRETSFITNGSCLASRKTSFMMALCLSSIYEDLKMYQVEFKTMNAKLLMDPKRQIFLDQNMLAVIDELMQALNFNSETVPQKSSLEEPDFYKTKIKLCILLHAFRIRAVTIDRVMSYLNAS

SEQ ID NO: 694 - protein, 571 aa, Artificial Sequence
  Description of Artificial Sequence: Synthetic polypeptide
QVQLVQSGAEVKKPGASVKVSCKASGYTFTRYGISWVRQAPGQGLEWMGWISTYSGNTNYAQKLQGRVTMTTDTSTSTAYMELRSLRSDDTAVYYCARRQLYFDYWGQGTLVTVSSASTKGPSVFPLAPCSRSTSESTAALGCLVKDYFPEPVTVSWNSGALTSGVHTFPAVLQSSGLYSLSSVVTVPSSNFGTQTYTCNVDHKPSNTKVDKTVERKCCVECPPCPAPPVAGPSVFLFPPKPKDTLMISRTPEVTCVVVDVSHEDPEVQFNWYVDGVEVHNAKTKPREEQFNSTFRVVSVLTVVHQDWLNGKEYKCKVSNKGLPAPIEKTISKTKGQPREPQVYTLPPSREEMTKNQVSLTCLVKGFYPSDIAVEWESNGQPENNYKTTPPMLDSDGSFFLYSKLTVDKSRWQQGNVFSCSVMHEALHNHYTQKSLSLSPGKGGGGSGGGGSGGGGSNWVNVISDLKKIEDLIQSMHIDATLYTESDVHPSCKVTAMKCFLLELQVISLESGDASIHDTVENLIILANNSLSSNGNVTESGCKECEELEEKNIKEFLQSFVHIVQMFINTS

SEQ ID NO: 695 - protein, 624 aa, Artificial Sequence
  Description of Artificial Sequence: Synthetic polypeptide
QVQLVQSGAEVKKPGASVKVSCKASGYTFTRYGISWVRQAPGQGLEWMGWISTYSGNTNYAQKLQGRVTMTTDTSTSTAYMELRSLRSDDTAVYYCARRQLYFDYWGQGTLVTVSSASTKGPSVFPLAPCSRSTSESTAALGCLVKDYFPEPVTVSWNSGALTSGVHTFPAVLQSSGLYSLSSVVTVPSSNFGTQTYTCNVDHKPSNTKVDKTVERKCCVECPPCPAPPVAGPSVFLFPPKPKDTLMISRTPEVTCVVVDVSHEDPEVQFNWYVDGVEVHNAKTKPREEQFNSTFRVVSVLTVVHQDWLNGKEYKCKVSNKGLPAPIEKTISKTKGQPREPQVYTLPPSREEMTKNQVSLTCLVKGFYPSDIAVEWESNGQPENNYKTTPPMLDSDGSFFLYSKLTVDKSRWQQGNVFSCSVMHEALHNHYTQKSLSLSPGKGGGGSGGGGSGGGGSDGPAGSWEQLIQERRSHEVNPAAHLTGANSSLTGSGGPLLWETQLGLAFLRGLSYHDGALVVTKAGYYYIYSKVQLGGVGCPLGLASTITHGLYKRTPRYPEELELLVSQQSPCGRATSSSRVWWDSSFLGGVVHLEAGEKVVVRVLDERLVRLRDGTRSYFGAFMV

SEQ ID NO: 696 - protein, 590 aa, Artificial Sequence
  Description of Artificial Sequence: Synthetic polypeptide
QVQLVQSGAEVKKPGASVKVSCKASGYTFTRYGISWVRQAPGQGLEWMGWISTYSGNTNYAQKLQGRVTMTTDTSTSTAYMELRSLRSDDTAVYYCARRQLYFDYWGQGTLVTVSSASTKGPSVFPLAPCSRSTSESTAALGCLVKDYFPEPVTVSWNSGALTSGVHTFPAVLQSSGLYSLSSVVTVPSSNFGTQTYTCNVDHKPSNTKVDKTVERKCCVECPPCPAPPVAGPSVFLFPPKPKDTLMISRTPEVTCVVVDVSHEDPEVQFNWYVDGVEVHNAKTKPREEQFNSTFRVVSVLTVVHQDWLNGKEYKCKVSNKGLPAPIEKTISKTKGQPREPQVYTLPPSREEMTKNQVSLTCLVKGFYPSDIAVEWESNGQPENNYKTTPPMLDSDGSFFLYSKLTVDKSRWQQGNVFSCSVMHEALHNHYTQKSLSLSPGKGGGGSGGGGSGGGGSQVSHRYPRIQSIKVQFTEYKKEKGFILTSQKEDEIMKVQNNSVIINCDGFYLISLKGYFSQEVNISLHYQKDEEPLFQLKKVRSVNSLMVASLTYKDKVYLNVTTDNTSLDDFHVNGGELILIHQNPGEFCVL

SEQ ID NO: 697 - protein, 434 aa, Artificial Sequence
  Description of Artificial Sequence: Synthetic polypeptide
EIVMTQSPATLSVSPGERATLSCRASQSVSSNLAWFQQKPGQAPRPLIYDASTRATGVPARFSGSGSGTDFTLTISSLQSEDFAVYYCQQYDNWPLTFGGGTKVEIKRTVAAPSVFIFPPSDEQLKSGTASVVCLLNNFYPREAKVQWKVDNALQSGNSQESVTEQDSKDSTYSLSSTLTLSKADYEKHKVYACEVTHQGLSSPVTKSFNRGECGGGGSGGGGSGGGGSACPWAVSGARASPGSAASPRLREGPELSPDDPAGLLDLRQGMFAQLVAQNVLLIDGPLSWYSDPGLAGVSLTGGLSYKEDTKELVVAKAGVYYVFFQLELRRVVAGEGSGSVSLALHLQPLRSAAGAAALALTVDLPPASSEARNSAFGFQGRLLHLSAGQRLGVHLHTEARARHAWQLTQGATVLGLFRVTPEIPAGLPSPRSE

SEQ ID NO: 698 - protein, 401 aa, Artificial Sequence
  Description of Artificial Sequence: Synthetic polypeptide
EIVMTQSPATLSVSPGERATLSCRASQSVSSNLAWFQQKPGQAPRPLIYDASTRATGVPARFSGSGSGTDFTLTISSLQSEDFAVYYCQQYDNWPLTFGGGTKVEIKRTVAAPSVFIFPPSDEQLKSGTASVVCLLNNFYPREAKVQWKVDNALQSGNSQESVTEQDSKDSTYSLSSTLTLSKADYEKHKVYACEVTHQGLSSPVTKSFNRGECGGGGSGGGGSGGGGSQRTDSIPNSPDNVPLKGGNCSEDLLCILKRAPFKKSWAYLQVAKHLNKTKLSWNKDGILHGVRYQDGNLVIQFPGLYFIICQLQFLVQCPNNSVDLKLELLINKHIKKQALVTVCESGMQTKHVYQNLSQFLLDYLQVNTTISVNVDTFQYIDTSTFPLENVLSIFLYSNSD

SEQ ID NO: 699 - protein, 375 aa, Artificial Sequence
  Description of Artificial Sequence: Synthetic polypeptide
EIVMTQSPATLSVSPGERATLSCRASQSVSSNLAWFQQKPGQAPRPLIYDASTRATGVPARFSGSGSGTDFTLTISSLQSEDFAVYYCQQYDNWPLTFGGGTKVEIKRTVAAPSVFIFPPSDEQLKSGTASVVCLLNNFYPREAKVQWKVDNALQSGNSQESVTEQDSKDSTYSLSSTLTLSKADYEKHKVYACEVTHQGLSSPVTKSFNRGECGGGGSGGGGSGGGGSGDQNPQIAAHVISEASSKTTSVLQWAEKGYYTMSNNLVTLENGKQLTVKRQGLYYIYAQVTFCSNREASSQAPFIASLCLKSPGRFERILLRAANTHSSAKPCGQQSIHLGGVFELQPGASVFVNVTDPSQVSHGTGFTSFGLLKL

SEQ ID NO: 700 - protein, 384 aa, Artificial Sequence
  Description of Artificial Sequence: Synthetic polypeptide
EIVMTQSPATLSVSPGERATLSCRASQSVSSNLAWFQQKPGQAPRPLIYDASTRATGVPARFSGSGSGTDFTLTISSLQSEDFAVYYCQQYDNWPLTFGGGTKVEIKRTVAAPSVFIFPPSDEQLKSGTASVVCLLNNFYPREAKVQWKVDNALQSGNSQESVTEQDSKDSTYSLSSTLTLSKADYEKHKVYACEVTHQGLSSPVTKSFNRGECGGGGSGGGGSGGGGSQRFAQAQQQLPLESLGWDVAELQLNHTGPQQDPRLYWQGGPALGRSFLHGPELDKGQLRIHRDGIYMVHIQVTLAICSSTTASRHHPTTLAVGICSPASRSISLLRLSFHQGCTIASQRLTPLARGDTLCTNLTGTLLPSRNTDETFFGVQWVRP

SEQ ID NO: 701 - protein, 357 aa, Artificial Sequence
  Description of Artificial Sequence: Synthetic polypeptide
EIVMTQSPATLSVSPGERATLSCRASQSVSSNLAWFQQKPGQAPRPLIYDASTRATGVPARFSGSGSGTDFTLTISSLQSEDFAVYYCQQYDNWPLTFGGGTKVEIKRTVAAPSVFIFPPSDEQLKSGTASVVCLLNNFYPREAKVQWKVDNALQSGNSQESVTEQDSKDSTYSLSSTLTLSKADYEKHKVYACEVTHQGLSSPVTKSFNRGECGGGGSGGGGSGGGGSQLETAKEPCMAKFGPLPSKWQMASSEPPCVNKVSDWKLEILQNGLYLIYGQVAPNANYNDVAPFEVRLYKNKDMIQTLTNKSKIQNVGGTYELHVGDTIDLIFNSEHQVLKNNTYWGIILLANPQFIS

SEQ ID NO: 702 - protein, 469 aa, Artificial Sequence
  Description of Artificial Sequence: Synthetic polypeptide
EIVMTQSPATLSVSPGERATLSCRASQSVSSNLAWFQQKPGQAPRPLIYDASTRATGVPARFSGSGSGTDFTLTISSLQSEDFAVYYCQQYDNWPLTFGGGTKVEIKRTVAAPSVFIFPPSDEQLKSGTASVVCLLNNFYPREAKVQWKVDNALQSGNSQESVTEQDSKDSTYSLSSTLTLSKADYEKHKVYACEVTHQGLSSPVTKSFNRGECGGGGSGGGGSGGGGSDTQEKEVRAMVGSDVELSCACPEGSRFDLNDVYVYWQTSESKTVVTYHIPQNSSLENVDSRYRNRALMSPAGMLRGDFSLRLFNVTPQDEQKFHCLVLSQSLGFQEVLSVEVTLHVAANFSVPVVSAPHSPSQDELTFTCTSINGYPRPNVYWINKTDNSLLDQALQNDTVFLNMRGLYDVVSVLRIARTPSVNIGCCIENVLLQQNLTVGSQTGNDIGERDKITENPVSTGEKNAATWS

SEQ ID NO: 703 - protein, 747 aa, Artificial Sequence
  Description of Artificial Sequence: Synthetic polypeptide
EIVMTQSPATLSVSPGERATLSCRASQSVSSNLAWFQQKPGQAPRPLIYDASTRATGVPARFSGSGSGTDFTLTISSLQSEDFAVYYCQQYDNWPLTFGGGTKVEIKRTVAAPSVFIFPPSDEQLKSGTASVVCLLNNFYPREAKVQWKVDNALQSGNSQESVTEQDSKDSTYSLSSTLTLSKADYEKHKVYACEVTHQGLSSPVTKSFNRGECGGGGSGGGGSGGGGSIWELKKDVYVVELDWYPDAPGEMVVLTCDTPEEDGITWTLDQSSEVLGSGKTLTIQVKEFGDAGQYTCHKGGEVLSHSLLLLHKKEDGIWSTDILKDQKEPKNKTFLRCEAKNYSGRFTCWWLTTISTDLTFSVKSSRGSSDPQGVTCGAATLSAERVRGDNKEYEYSVECQEDSACPAAEESLPIEVMVDAVHKLKYENYTSSFFIRDIIKPDPPKNLQLKPLKNSRQVEVSWEYPDTWSTPHSYFSLTFCVQVQGKSKREKKDRVFTDKTSATVICRKNASISVRAQDRYYSSSWSEWASVPCSGGGGSGGGGSGGGGSRNLPVATPDPGMFPCLHHSQNLLRAVSNMLQKARQTLEFYPCTSEEIDHEDITKDKTSTVEACLPLELTKNESCLNSRETSFITNGSCLASRKTSFMMALCLSSIYEDLKMYQVEFKTMNAKLLMDPKRQIFLDQNMLAVIDELMQALNFNSETVPQKSSLEEPDFYKTKIKLCILLHAFRIRAVTIDRVMSYLNAS

SEQ ID NO: 704 - protein, 343 aa, Artificial Sequence
  Description of Artificial Sequence: Synthetic polypeptide
EIVMTQSPATLSVSPGERATLSCRASQSVSSNLAWFQQKPGQAPRPLIYDASTRATGVPARFSGSGSGTDFTLTISSLQSEDFAVYYCQQYDNWPLTFGGGTKVEIKRTVAAPSVFIFPPSDEQLKSGTASVVCLLNNFYPREAKVQWKVDNALQSGNSQESVTEQDSKDSTYSLSSTLTLSKADYEKHKVYACEVTHQGLSSPVTKSFNRGECGGGGSGGGGSGGGGSNWVNVISDLKKIEDLIQSMHIDATLYTESDVHPSCKVTAMKCFLLELQVISLESGDASIHDTVENLIILANNSLSSNGNVTESGCKECEELEEKNIKEFLQSFVHIVQMFINTS

SEQ ID NO: 705 - protein, 396 aa, Artificial Sequence
  Description of Artificial Sequence: Synthetic polypeptide
EIVMTQSPATLSVSPGERATLSCRASQSVSSNLAWFQQKPGQAPRPLIYDASTRATGVPARFSGSGSGTDFTLTISSLQSEDFAVYYCQQYDNWPLTFGGGTKVEIKRTVAAPSVFIFPPSDEQLKSGTASVVCLLNNFYPREAKVQWKVDNALQSGNSQESVTEQDSKDSTYSLSSTLTLSKADYEKHKVYACEVTHQGLSSPVTKSFNRGECGGGGSGGGGSGGGGSDGPAGSWEQLIQERRSHEVNPAAHLTGANSSLTGSGGPLLWETQLGLAFLRGLSYHDGALVVTKAGYYYIYSKVQLGGVGCPLGLASTITHGLYKRTPRYPEELELLVSQQSPCGRATSSSRVWWDSSFLGGVVHLEAGEKVVVRVLDERLVRLRDGTRSYFGAFMV

SEQ ID NO: 706 - protein, 362 aa, Artificial Sequence
  Description of Artificial Sequence: Synthetic polypeptide
EIVMTQSPATLSVSPGERATLSCRASQSVSSNLAWFQQKPGQAPRPLIYDASTRATGVPARFSGSGSGTDFTLTISSLQSEDFAVYYCQQYDNWPLTFGGGTKVEIKRTVAAPSVFIFPPSDEQLKSGTASVVCLLNNFYPREAKVQWKVDNALQSGNSQESVTEQDSKDSTYSLSSTLTLSKADYEKHKVYACEVTHQGLSSPVTKSFNRGECGGGGSGGGGSGGGGSQVSHRYPRIQSIKVQFTEYKKEKGFILTSQKEDEIMKVQNNSVIINCDGFYLISLKGYFSQEVNISLHYQKDEEPLFQLKKVRSVNSLMVASLTYKDKVYLNVTTDNTSLDDFHVNGGELILIHQNPGEFCVL

SEQ ID NO: 707 - protein, 673 aa, Artificial Sequence
  Description of Artificial Sequence: Synthetic polypeptide
EVQLVESGGGLVQPGGSLRLSCAASGYTFTNYGMNWVRQAPGKGLEWVGWINTYTGEPTYAADFKRRFTFSLDTSKSTAYLQMNSLRAEDTAVYYCAKYPHYYGSSHWYFDVWGQGTLVTVSSASTKGPSVFPLAPSSKSTSGGTAALGCLVKDYFPEPVTVSWNSGALTSGVHTFPAVLQSSGLYSLSSVVTVPSSSLGTQTYICNVNHKPSNTKVDKKVEPKSCDKTHTCPPCPAPELLGGPSVFLFPPKPKDTLMISRTPEVTCVVVDVSHEDPEVKFNWYVDGVEVHNAKTKPREEQYNSTYRVVSVLTVLHQDWLNGKEYKCKVSNKALPAPIEKTISKAKGQPREPQVYTLPPSREEMTKNQVSLTCLVKGFYPSDIAVEWESNGQPENNYKTTPPVLDSDGSFFLYSKLTVDKSRWQQGNVFSCSVMHEALHNHYTQKSLSLSPGKGGGGSGGGGSGGGGSACPWAVSGARASPGSAASPRLREGPELSPDDPAGLLDLRQGMFAQLVAQNVLLIDGPLSWYSDPGLAGVSLTGGLSYKEDTKELVVAKAGVYYVFFQLELRRVVAGEGSGSVSLALHLQPLRSAAGAAALALTVDLPPASSEARNSAFGFQGRLLHLSAGQRLGVHLHTEARARHAWQLTQGATVLGLFRVTPEIPAGLPSPRSE

SEQ ID NO: 708 - protein, 640 aa, Artificial Sequence
  Description of Artificial Sequence: Synthetic polypeptide
EVQLVESGGGLVQPGGSLRLSCAASGYTFTNYGMNWVRQAPGKGLEWVGWINTYTGEPTYAADFKRRFTFSLDTSKSTAYLQMNSLRAEDTAVYYCAKYPHYYGSSHWYFDVWGQGTLVTVSSASTKGPSVFPLAPSSKSTSGGTAALGCLVKDYFPEPVTVSWNSGALTSGVHTFPAVLQSSGLYSLSSVVTVPSSSLGTQTYICNVNHKPSNTKVDKKVEPKSCDKTHTCPPCPAPELLGGPSVFLFPPKPKDTLMISRTPEVTCVVVDVSHEDPEVKFNWYVDGVEVHNAKTKPREEQYNSTYRVVSVLTVLHQDWLNGKEYKCKVSNKALPAPIEKTISKAKGQPREPQVYTLPPSREEMTKNQVSLTCLVKGFYPSDIAVEWESNGQPENNYKTTPPVLDSDGSFFLYSKLTVDKSRWQQGNVFSCSVMHEALHNHYTQKSLSLSPGKGGGGSGGGGSGGGGSQRTDSIPNSPDNVPLKGGNCSEDLLCILKRAPFKKSWAYLQVAKHLNKTKLSWNKDGILHGVRYQDGNLVIQFPGLYFIICQLQFLVQCPNNSVDLKLELLINKHIKKQALVTVCESGMQTKHVYQNLSQFLLDYLQVNTTISVNVDTFQYIDTSTFPLENVLSIFLYSNSD

SEQ ID NO: 709 - protein, 614 aa, Artificial Sequence
  Description of Artificial Sequence: Synthetic polypeptide
EVQLVESGGGLVQPGGSLRLSCAASGYTFTNYGMNWVRQAPGKGLEWVGWINTYTGEPTYAADFKRRFTFSLDTSKSTAYLQMNSLRAEDTAVYYCAKYPHYYGSSHWYFDVWGQGTLVTVSSASTKGPSVFPLAPSSKSTSGGTAALGCLVKDYFPEPVTVSWNSGALTSGVHTFPAVLQSSGLYSLSSVVTVPSSSLGTQTYICNVNHKPSNTKVDKKVEPKSCDKTHTCPPCPAPELLGGPSVFLFPPKPKDTLMISRTPEVTCVVVDVSHEDPEVKFNWYVDGVEVHNAKTKPREEQYNSTYRVVSVLTVLHQDWLNGKEYKCKVSNKALPAPIEKTISKAKGQPREPQVYTLPPSREEMTKNQVSLTCLVKGFYPSDIAVEWESNGQPENNYKTTPPVLDSDGSFFLYSKLTVDKSRWQQGNVFSCSVMHEALHNHYTQKSLSLSPGKGGGGSGGGGSGGGGSGDQNPQIAAHVISEASSKTTSVLQWAEKGYYTMSNNLVTLENGKQLTVKRQGLYYIYAQVTFCSNREASSQAPFIASLCLKSPGRFERILLRAANTHSSAKPCGQQSIHLGGVFELQPGASVFVNVTDPSQVSHGTGFTSFGLLKL

SEQ ID NO: 710 - protein, 623 aa, Artificial Sequence
  Description of Artificial Sequence: Synthetic polypeptide
EVQLVESGGGLVQPGGSLRLSCAASGYTFTNYGMNWVRQAPGKGLEWVGWINTYTGEPTYAADFKRRFTFSLDTSKSTAYLQMNSLRAEDTAVYYCAKYPHYYGSSHWYFDVWGQGTLVTVSSASTKGPSVFPLAPSSKSTSGGTAALGCLVKDYFPEPVTVSWNSGALTSGVHTFPAVLQSSGLYSLSSVVTVPSSSLGTQTYICNVNHKPSNTKVDKKVEPKSCDKTHTCPPCPAPELLGGPSVFLFPPKPKDTLMISRTPEVTCVVVDVSHEDPEVKFNWYVDGVEVHNAKTKPREEQYNSTYRVVSVLTVLHQDWLNGKEYKCKVSNKALPAPIEKTISKAKGQPREPQVYTLPPSREEMTKNQVSLTCLVKGFYPSDIAVEWESNGQPENNYKTTPPVLDSDGSFFLYSKLTVDKSRWQQGNVFSCSVMHEALHNHYTQKSLSLSPGKGGGGSGGGGSGGGGSQRFAQAQQQLPLESLGWDVAELQLNHTGPQQDPRLYWQGGPALGRSFLHGPELDKGQLRIHRDGIYMVHIQVTLAICSSTTASRHHPTTLAVGICSPASRSISLLRLSFHQGCTIASQRLTPLARGDTLCTNLTGTLLPSRNTDETFFGVQWVRP

SEQ ID NO: 711 - protein, 596 aa, Artificial Sequence
  Description of Artificial Sequence: Synthetic polypeptide
EVQLVESGGGLVQPGGSLRLSCAASGYTFTNYGMNWVRQAPGKGLEWVGWINTYTGEPTYAADFKRRFTFSLDTSKSTAYLQMNSLRAEDTAVYYCAKYPHYYGSSHWYFDVWGQGTLVTVSSASTKGPSVFPLAPSSKSTSGGTAALGCLVKDYFPEPVTVSWNSGALTSGVHTFPAVLQSSGLYSLSSVVTVPSSSLGTQTYICNVNHKPSNTKVDKKVEPKSCDKTHTCPPCPAPELLGGPSVFLFPPKPKDTLMISRTPEVTCVVVDVSHEDPEVKFNWYVDGVEVHNAKTKPREEQYNSTYRVVSVLTVLHQDWLNGKEYKCKVSNKALPAPIEKTISKAKGQPREPQVYTLPPSREEMTKNQVSLTCLVKGFYPSDIAVEWESNGQPENNYKTTPPVLDSDGSFFLYSKLTVDKSRWQQGNVFSCSVMHEALHNHYTQKSLSLSPGKGGGGSGGGGSGGGGSQLETAKEPCMAKFGPLPSKWQMASSEPPCVNKVSDWKLEILQNGLYLIYGQVAPNANYNDVAPFEVRLYKNKDMIQTLTNKSKIQNVGGTYELHVGDTIDLIFNSEHQVLKNNTYWGIILLANPQFIS

SEQ ID NO: 712 - protein, 708 aa, Artificial Sequence
  Description of Artificial Sequence: Synthetic polypeptide
EVQLVESGGGLVQPGGSLRLSCAASGYTFTNYGMNWVRQAPGKGLEWVGWINTYTGEPTYAADFKRRFTFSLDTSKSTAYLQMNSLRAEDTAVYYCAKYPHYYGSSHWYFDVWGQGTLVTVSSASTKGPSVFPLAPSSKSTSGGTAALGCLVKDYFPEPVTVSWNSGALTSGVHTFPAVLQSSGLYSLSSVVTVPSSSLGTQTYICNVNHKPSNTKVDKKVEPKSCDKTHTCPPCPAPELLGGPSVFLFPPKPKDTLMISRTPEVTCVVVDVSHEDPEVKFNWYVDGVEVHNAKTKPREEQYNSTYRVVSVLTVLHQDWLNGKEYKCKVSNKALPAPIEKTISKAKGQPREPQVYTLPPSREEMTKNQVSLTCLVKGFYPSDIAVEWESNGQPENNYKTTPPVLDSDGSFFLYSKLTVDKSRWQQGNVFSCSVMHEALHNHYTQKSLSLSPGKGGGGSGGGGSGGGGSDTQEKEVRAMVGSDVELSCACPEGSRFDLNDVYVYWQTSESKTVVTYHIPQNSSLENVDSRYRNRALMSPAGMLRGDFSLRLFNVTPQDEQKFHCLVLSQSLGFQEVLSVEVTLHVAANFSVPVVSAPHSPSQDELTFTCTSINGYPRPNVYWINKTDNSLLDQALQNDTVFLNMRGLYDVVSVLRIARTPSVNIGCCIENVLLQQNLTVGSQTGNDIGERDKITENPVSTGEKNAATWS

SEQ ID NO: 713 - protein, 986 aa, Artificial Sequence
  Description of Artificial Sequence: Synthetic polypeptide
EVQLVESGGGLVQPGGSLRLSCAASGYTFTNYGMNWVRQAPGKGLEWVGWINTYTGEPTYAADFKRRFTFSLDTSKSTAYLQMNSLRAEDTAVYYCAKYPHYYGSSHWYFDVWGQGTLVTVSSASTKGPSVFPLAPSSKSTSGGTAALGCLVKDYFPEPVTVSWNSGALTSGVHTFPAVLQSSGLYSLSSVVTVPSSSLGTQTYICNVNHKPSNTKVDKKVEPKSCDKTHTCPPCPAPELLGGPSVFLFPPKPKDTLMISRTPEVTCVVVDVSHEDPEVKFNWYVDGVEVHNAKTKPREEQYNSTYRVVSVLTVLHQDWLNGKEYKCKVSNKALPAPIEKTISKAKGQPREPQVYTLPPSREEMTKNQVSLTCLVKGFYPSDIAVEWESNGQPENNYKTTPPVLDSDGSFFLYSKLTVDKSRWQQGNVFSCSVMHEALHNHYTQKSLSLSPGKGGGGSGGGGSGGGGSIWELKKDVYVVELDWYPDAPGEMVVLTCDTPEEDGITWTLDQSSEVLGSGKTLTIQVKEFGDAGQYTCHKGGEVLSHSLLLLHKKEDGIWSTDILKDQKEPKNKTFLRCEAKNYSGRFTCWWLTTISTDLTFSVKSSRGSSDPQGVTCGAATLSAERVRGDNKEYEYSVECQEDSACPAAEESLPIEVMVDAVHKLKYENYTSSFFIRDIIKPDPPKNLQLKPLKNSRQVEVSWEYPDTWSTPHSYFSLTFCVQVQGKSKREKKDRVFTDKTSATVICRKNASISVRAQDRYYSSSWSEWASVPCSGGGGSGGGGSGGGGSRNLPVATPDPGMFPCLHHSQNLLRAVSNMLQKARQTLEFYPCTSEEIDHEDITKDKTSTVEACLPLELTKNESCLNSRETSFITNGSCLASRKTSFMMALCLSSIYEDLKMYQVEFKTMNAKLLMDPKRQIFLDQNMLAVIDELMQALNFNSETVPQKSSLEEPDFYKTKIKLCILLHAFRIRAVTIDRVMSYLNAS

SEQ ID NO: 714 - protein, 582 aa, Artificial Sequence
  Description of Artificial Sequence: Synthetic polypeptide
EVQLVESGGGLVQPGGSLRLSCAASGYTFTNYGMNWVRQAPGKGLEWVGWINTYTGEPTYAADFKRRFTFSLDTSKSTAYLQMNSLRAEDTAVYYCAKYPHYYGSSHWYFDVWGQGTLVTVSSASTKGPSVFPLAPSSKSTSGGTAALGCLVKDYFPEPVTVSWNSGALTSGVHTFPAVLQSSGLYSLSSVVTVPSSSLGTQTYICNVNHKPSNTKVDKKVEPKSCDKTHTCPPCPAPELLGGPSVFLFPPKPKDTLMISRTPEVTCVVVDVSHEDPEVKFNWYVDGVEVHNAKTKPREEQYNSTYRVVSVLTVLHQDWLNGKEYKCKVSNKALPAPIEKTISKAKGQPREPQVYTLPPSREEMTKNQVSLTCLVKGFYPSDIAVEWESNGQPENNYKTTPPVLDSDGSFFLYSKLTVDKSRWQQGNVFSCSVMHEALHNHYTQKSLSLSPGKGGGGSGGGGSGGGGSNWVNVISDLKKIEDLIQSMHIDATLYTESDVHPSCKVTAMKCFLLELQVISLESGDASIHDTVENLIILANNSLSSNGNVTESGCKECEELEEKNIKEFLQSFVHIVQMFINTS

SEQ ID NO: 715 - protein, 635 aa, Artificial Sequence
  Description of Artificial Sequence: Synthetic polypeptide
EVQLVESGGGLVQPGGSLRLSCAASGYTFTNYGMNWVRQAPGKGLEWVGWINTYTGEPTYAADFKRRFTFSLDTSKSTAYLQMNSLRAEDTAVYYCAKYPHYYGSSHWYFDVWGQGTLVTVSSASTKGPSVFPLAPSSKSTSGGTAALGCLVKDYFPEPVTVSWNSGALTSGVHTFPAVLQSSGLYSLSSVVTVPSSSLGTQTYICNVNHKPSNTKVDKKVEPKSCDKTHTCPPCPAPELLGGPSVFLFPPKPKDTLMISRTPEVTCVVVDVSHEDPEVKFNWYVDGVEVHNAKTKPREEQYNSTYRVVSVLTVLHQDWLNGKEYKCKVSNKALPAPIEKTISKAKGQPREPQVYTLPPSREEMTKNQVSLTCLVKGFYPSDIAVEWESNGQPENNYKTTPPVLDSDGSFFLYSKLTVDKSRWQQGNVFSCSVMHEALHNHYTQKSLSLSPGKGGGGSGGGGSGGGGSDGPAGSWEQLIQERRSHEVNPAAHLTGANSSLTGSGGPLLWETQLGLAFLRGLSYHDGALVVTKAGYYYIYSKVQLGGVGCPLGLASTITHGLYKRTPRYPEELELLVSQQSPCGRATSSSRVWWDSSFLGGVVHLEAGEKVVVRVLDERLVRLRDGTRSYFGAFMV

SEQ ID NO: 716 - protein, 601 aa, Artificial Sequence
  Description of Artificial Sequence: Synthetic polypeptide
EVQLVESGGGLVQPGGSLRLSCAASGYTFTNYGMNWVRQAPGKGLEWVGWINTYTGEPTYAADFKRRFTFSLDTSKSTAYLQMNSLRAEDTAVYYCAKYPHYYGSSHWYFDVWGQGTLVTVSSASTKGPSVFPLAPSSKSTSGGTAALGCLVKDYFPEPVTVSWNSGALTSGVHTFPAVLQSSGLYSLSSVVTVPSSSLGTQTYICNVNHKPSNTKVDKKVEPKSCDKTHTCPPCPAPELLGGPSVFLFPPKPKDTLMISRTPEVTCVVVDVSHEDPEVKFNWYVDGVEVHNAKTKPREEQYNSTYRVVSVLTVLHQDWLNGKEYKCKVSNKALPAPIEKTISKAKGQPREPQVYTLPPSREEMTKNQVSLTCLVKGFYPSDIAVEWESNGQPENNYKTTPPVLDSDGSFFLYSKLTVDKSRWQQGNVFSCSVMHEALHNHYTQKSLSLSPGKGGGGSGGGGSGGGGSQVSHRYPRIQSIKVQFTEYKKEKGFILTSQKEDEIMKVQNNSVIINCDGFYLISLKGYFSQEVNISLHYQKDEEPLFQLKKVRSVNSLMVASLTYKDKVYLNVTTDNTSLDDFHVNGGELILIHQNPGEFCVL

SEQ ID NO: 717 - protein, 434 aa, Artificial Sequence
  Description of Artificial Sequence: Synthetic polypeptide
DIQMTQSPSSLSASVGDRVTITCSASQDISNYLNWYQQKPGKAPKVLIYFTSSLHSGVPSRFSGSGSGTDFTLTISSLQPEDFATYYCQQYSTVPWTFGQGTKVEIKRTVAAPSVFIFPPSDEQLKSGTASVVCLLNNFYPREAKVQWKVDNALQSGNSQESVTEQDSKDSTYSLSSTLTLSKADYEKHKVYACEVTHQGLSSPVTKSFNRGECGGGGSGGGGSGGGGSACPWAVSGARASPGSAASPRLREGPELSPDDPAGLLDLRQGMFAQLVAQNVLLIDGPLSWYSDPGLAGVSLTGGLSYKEDTKELVVAKAGVYYVFFQLELRRVVAGEGSGSVSLALHLQPLRSAAGAAALALTVDLPPASSEARNSAFGFQGRLLHLSAGQRLGVHLHTEARARHAWQLTQGATVLGLFRVTPEIPAGLPSPRSE

SEQ ID NO: 718 - protein, 401 aa, Artificial Sequence
  Description of Artificial Sequence: Synthetic polypeptide
DIQMTQSPSSLSASVGDRVTITCSASQDISNYLNWYQQKPGKAPKVLIYFTSSLHSGVPSRFSGSGSGTDFTLTISSLQPEDFATYYCQQYSTVPWTFGQGTKVEIKRTVAAPSVFIFPPSDEQLKSGTASVVCLLNNFYPREAKVQWKVDNALQSGNSQESVTEQDSKDSTYSLSSTLTLSKADYEKHKVYACEVTHQGLSSPVTKSFNRGECGGGGSGGGGSGGGGSQRTDSIPNSPDNVPLKGGNCSEDLLCILKRAPFKKSWAYLQVAKHLNKTKLSWNKDGILHGVRYQDGNLVIQFPGLYFIICQLQFLVQCPNNSVDLKLELLINKHIKKQALVTVCESGMQTKHVYQNLSQFLLDYLQVNTTISVNVDTFQYIDTSTFPLENVLSIFLYSNSD

SEQ ID NO: 719 - protein, 375 aa, Artificial Sequence
  Description of Artificial Sequence: Synthetic polypeptide
DIQMTQSPSSLSASVGDRVTITCSASQDISNYLNWYQQKPGKAPKVLIYFTSSLHSGVPSRFSGSGSGTDFTLTISSLQPEDFATYYCQQYSTVPWTFGQGTKVEIKRTVAAPSVFIFPPSDEQLKSGTASVVCLLNNFYPREAKVQWKVDNALQSGNSQESVTEQDSKDSTYSLSSTLTLSKADYEKHKVYACEVTHQGLSSPVTKSFNRGECGGGGSGGGGSGGGGSGDQNPQIAAHVISEASSKTTSVLQWAEKGYYTMSNNLVTLENGKQLTVKRQGLYYIYAQVTFCSNREASSQAPFIASLCLKSPGRFERILLRAANTHSSAKPCGQQSIHLGGVFELQPGASVFVNVTDPSQVSHGTGFTSFGLLKL

SEQ ID NO: 720 - protein, 384 aa, Artificial Sequence
  Description of Artificial Sequence: Synthetic polypeptide
DIQMTQSPSSLSASVGDRVTITCSASQDISNYLNWYQQKPGKAPKVLIYFTSSLHSGVPSRFSGSGSGTDFTLTISSLQPEDFATYYCQQYSTVPWTFGQGTKVEIKRTVAAPSVFIFPPSDEQLKSGTASVVCLLNNFYPREAKVQWKVDNALQSGNSQESVTEQDSKDSTYSLSSTLTLSKADYEKHKVYACEVTHQGLSSPVTKSFNRGECGGGGSGGGGSGGGGSQRFAQAQQQLPLESLGWDVAELQLNHTGPQQDPRLYWQGGPALGRSFLHGPELDKGQLRIHRDGIYMVHIQVTLAICSSTTASRHHPTTLAVGICSPASRSISLLRLSFHQGCTIASQRLTPLARGDTLCTNLTGTLLPSRNTDETFFGVQWVRP

SEQ ID NO: 721 - protein, 357 aa, Artificial Sequence
  Description of Artificial Sequence: Synthetic polypeptide
DIQMTQSPSSLSASVGDRVTITCSASQDISNYLNWYQQKPGKAPKVLIYFTSSLHSGVPSRFSGSGSGTDFTLTISSLQPEDFATYYCQQYSTVPWTFGQGTKVEIKRTVAAPSVFIFPPSDEQLKSGTASVVCLLNNFYPREAKVQWKVDNALQSGNSQESVTEQDSKDSTYSLSSTLTLSKADYEKHKVYACEVTHQGLSSPVTKSFNRGECGGGGSGGGGSGGGGSQLETAKEPCMAKFGPLPSKWQMASSEPPCVNKVSDWKLEILQNGLYLIYGQVAPNANYNDVAPFEVRLYKNKDMIQTLTNKSKIQNVGGTYELHVGDTIDLIFNSEHQVLKNNTYWGIILLANPQFIS

SEQ ID NO: 722 - protein, 469 aa, Artificial Sequence
  Description of Artificial Sequence: Synthetic polypeptide
DIQMTQSPSSLSASVGDRVTITCSASQDISNYLNWYQQKPGKAPKVLIYFTSSLHSGVPSRFSGSGSGTDFTLTISSLQPEDFATYYCQQYSTVPWTFGQGTKVEIKRTVAAPSVFIFPPSDEQLKSGTASVVCLLNNFYPREAKVQWKVDNALQSGNSQESVTEQDSKDSTYSLSSTLTLSKADYEKHKVYACEVTHQGLSSPVTKSFNRGECGGGGSGGGGSGGGGSDTQEKEVRAMVGSDVELSCACPEGSRFDLNDVYVYWQTSESKTVVTYHIPQNSSLENVDSRYRNRALMSPAGMLRGDFSLRLFNVTPQDEQKFHCLVLSQSLGFQEVLSVEVTLHVAANFSVPVVSAPHSPSQDELTFTCTSINGYPRPNVYWINKTDNSLLDQALQNDTVFLNMRGLYDVVSVLRIARTPSVNIGCCIENVLLQQNLTVGSQTGNDIGERDKITENPVSTGEKNAATWS

SEQ ID NO: 723 - protein, 747 aa, Artificial Sequence
  Description of Artificial Sequence: Synthetic polypeptide
DIQMTQSPSSLSASVGDRVTITCSASQDISNYLNWYQQKPGKAPKVLIYFTSSLHSGVPSRFSGSGSGTDFTLTISSLQPEDFATYYCQQYSTVPWTFGQGTKVEIKRTVAAPSVFIFPPSDEQLKSGTASVVCLLNNFYPREAKVQWKVDNALQSGNSQESVTEQDSKDSTYSLSSTLTLSKADYEKHKVYACEVTHQGLSSPVTKSFNRGECGGGGSGGGGSGGGGSIWELKKDVYVVELDWYPDAPGEMVVLTCDTPEEDGITWTLDQSSEVLGSGKTLTIQVKEFGDAGQYTCHKGGEVLSHSLLLLHKKEDGIWSTDILKDQKEPKNKTFLRCEAKNYSGRFTCWWLTTISTDLTFSVKSSRGSSDPQGVTCGAATLSAERVRGDNKEYEYSVECQEDSACPAAEESLPIEVMVDAVHKLKYENYTSSFFIRDIIKPDPPKNLQLKPLKNSRQVEVSWEYPDTWSTPHSYFSLTFCVQVQGKSKREKKDRVFTDKTSATVICRKNASISVRAQDRYYSSSWSEWASVPCSGGGGSGGGGSGGGGSRNLPVATPDPGMFPCLHHSQNLLRAVSNMLQKARQTLEFYPCTSEEIDHEDITKDKTSTVEACLPLELTKNESCLNSRETSFITNGSCLASRKTSFMMALCLSSIYEDLKMYQVEFKTMNAKLLMDPKRQIFLDQNMLAVIDELMQALNFNSETVPQKSSLEEPDFYKTKIKLCILLHAFRIRAVTIDRVMSYLNAS

SEQ ID NO: 724 - protein, 343 aa, Artificial Sequence
  Description of Artificial Sequence: Synthetic polypeptide
DIQMTQSPSSLSASVGDRVTITCSASQDISNYLNWYQQKPGKAPKVLIYFTSSLHSGVPSRFSGSGSGTDFTLTISSLQPEDFATYYCQQYSTVPWTFGQGTKVEIKRTVAAPSVFIFPPSDEQLKSGTASVVCLLNNFYPREAKVQWKVDNALQSGNSQESVTEQDSKDSTYSLSSTLTLSKADYEKHKVYACEVTHQGLSSPVTKSFNRGECGGGGSGGGGSGGGGSNWVNVISDLKKIEDLIQSMHIDATLYTESDVHPSCKVTAMKCFLLELQVISLESGDASIHDTVENLIILANNSLSSNGNVTESGCKECEELEEKNIKEFLQSFVHIVQMFINTS

SEQ ID NO: 725 - protein, 396 aa, Artificial Sequence
  Description of Artificial Sequence: Synthetic polypeptide
DIQMTQSPSSLSASVGDRVTITCSASQDISNYLNWYQQKPGKAPKVLIYFTSSLHSGVPSRFSGSGSGTDFTLTISSLQPEDFATYYCQQYSTVPWTFGQGTKVEIKRTVAAPSVFIFPPSDEQLKSGTASVVCLLNNFYPREAKVQWKVDNALQSGNSQESVTEQDSKDSTYSLSSTLTLSKADYEKHKVYACEVTHQGLSSPVTKSFNRGECGGGGSGGGGSGGGGSDGPAGSWEQLIQERRSHEVNPAAHLTGANSSLTGSGGPLLWETQLGLAFLRGLSYHDGALVVTKAGYYYIYSKVQLGGVGCPLGLASTITHGLYKRTPRYPEELELLVSQQSPCGRATSSSRVWWDSSFLGGVVHLEAGEKVVVRVLDERLVRLRDGTRSYFGAFMV

SEQ ID NO: 726 - protein, 362 aa, Artificial Sequence
  Description of Artificial Sequence: Synthetic polypeptide
DIQMTQSPSSLSASVGDRVTITCSASQDISNYLNWYQQKPGKAPKVLIYFTSSLHSGVPSRFSGSGSGTDFTLTISSLQPEDFATYYCQQYSTVPWTFGQGTKVEIKRTVAAPSVFIFPPSDEQLKSGTASVVCLLNNFYPREAKVQWKVDNALQSGNSQESVTEQDSKDSTYSLSSTLTLSKADYEKHKVYACEVTHQGLSSPVTKSFNRGECGGGGSGGGGSGGGGSQVSHRYPRIQSIKVQFTEYKKEKGFILTSQKEDEIMKVQNNSVIINCDGFYLISLKGYFSQEVNISLHYQKDEEPLFQLKKVRSVNSLMVASLTYKDKVYLNVTTDNTSLDDFHVNGGELILIHQNPGEFCVL

SEQ ID NO: 727 - protein, 963 aa, Artificial Sequence
  Description of Artificial Sequence: Synthetic polypeptide
DIQLTQSPASLAVSLGQRATISCKASQSVDYDGDSYLNWYQQIPGQPPKLLIYDASNLVSGIPPRFSGSGSGTDFTLNIHPVEKVDAATYHCQQSTEDPWTFGGGTKLEIKGGGGSGGGGSGGGGSQVQLQQSGAELVRPGSSVKISCKASGYAFSSYWMNWVKQRPGQGLEWIGQIWPGDGDTNYNGKFKGKATLTADESSSTAYMQLSSLASEDSAVYFCARRETTTVGRYYYAMDYWGQGTTVTVSSGGGGSDIKLQQSGAELARPGASVKMSCKTSGYTFTRYTMHWVKQRPGQGLEWIGYINPSRGYTNYNQKFKDKATLTTDKSSSTAYMQLSSLTSEDSAVYYCARYYDDHYCLDYWGQGTTLTVSSVEGGSGGSGGSGGSGGVDDIQLTQSPAIMSASPGEKVTMTCRASSSVSYMNWYQQKSGTSPKRWIYDTSKVASGVPYRFSGSGSGTSYSLTISSMEAEDAATYYCQQWSSNPLTFGAGTKLELKASTKGPSVFPLAPSSKSTSGGTAALGCLVKDYFPEPVTVSWNSGALTSGVHTFPAVLQSSGLYSLSSVVTVPSSSLGTQTYICNVNHKPSNTKVDKKVEPKSCDKTHTCPPCPAPELLGGPSVFLFPPKPKDTLMISRTPEVTCVVVDVSHEDPEVKFNWYVDGVEVHNAKTKPREEQYNSTYRVVSVLTVLHQDWLNGKEYKCKVSNKALPAPIEKTISKAKGQPREPQVYTLPPSREEMTKNQVSLTCLVKGFYPSDIAVEWESNGQPENNYKTTPPVLDSDGSFFLYSKLTVDKSRWQQGNVFSCSVMHEALHNHYTQKSLSLSPGKGGGGSGGGGSGGGGSKESCDVQLYIKRQSEHSILAGDPFELECPVKYCANRPHVTWCKLNGTTCVKLEDRQTSWKEEKNISFFILHFEPVLPNDNGSYRCSANFQSNLIESHSTTLYVTDVKSASERPSKDEMAS

SEQ ID NO: 728 - protein, 639 aa, Artificial Sequence
  Description of Artificial Sequence: Synthetic polypeptide
DIQLTQSPASLAVSLGQRATISCKASQSVDYDGDSYLNWYQQIPGQPPKLLIYDASNLVSGIPPRFSGSGSGTDFTLNIHPVEKVDAATYHCQQSTEDPWTFGGGTKLEIKGGGGSGGGGSGGGGSQVQLQQSGAELVRPGSSVKISCKASGYAFSSYWMNWVKQRPGQGLEWIGQIWPGDGDTNYNGKFKGKATLTADESSSTAYMQLSSLASEDSAVYFCARRETTTVGRYYYAMDYWGQGTTVTVSSGGGGSDIKLQQSGAELARPGASVKMSCKTSGYTFTRYTMHWVKQRPGQGLEWIGYINPSRGYTNYNQKFKDKATLTTDKSSSTAYMQLSSLTSEDSAVYYCARYYDDHYCLDYWGQGTTLTVSSVEGGSGGSGGSGGSGGVDDIQLTQSPAIMSASPGEKVTMTCRASSSVSYMNWYQQKSGTSPKRWIYDTSKVASGVPYRFSGSGSGTSYSLTISSMEAEDAATYYCQQWSSNPLTFGAGTKLELKGGGGSGGGGSGGGGSKESCDVQLYIKRQSEHSILAGDPFELECPVKYCANRPHVTWCKLNGTTCVKLEDRQTSWKEEKNISFFILHFEPVLPNDNGSYRCSANFQSNLIESHSTTLYVTDVKSASERPSKDEMASHHHHHH

SEQ ID NO: 729 - protein, 963 aa, Artificial Sequence
  Description of Artificial Sequence: Synthetic polypeptide
QVQLVESGGGLVKPGESLRLSCAASGFTFSDYYMYWVRQAPGKGLEWVAIISDGGYYTYYSDIIKGRFTISRDNAKNSLYLQMNSLKAEDTAVYYCARGFPLLRHGAMDYWGQGTLVTVSSGGGGSGGGGSGGGGSDIQMTQSPSSLSASVGDRVTITCKASQNVDTNVAWYQQKPGQAPKSLIYSASYRYSDVPSRFSGSASGTDFTLTISSVQSEDFATYYCQQYDSYPYTFGGGTKLEIKSGGGGSEVQLVESGGGLVQPGGSLKLSCAASGFTFNKYAMNWVRQAPGKGLEWVARIRSKYNNYATYYADSVKDRFTISRDDSKNTAYLQMNNLKTEDTAVYYCVRHGNFGNSYISYWAYWGQGTLVTVSSGGGGSGGGGSGGGGSQTVVTQEPSLTVSPGGTVTLTCGSSTGAVTSGNYPNWVQQKPGQAPRGLIGGTKFLAPGTPARFSGSLLGGKAALTLSGVQPEDEAEYYCVLWYSNRWVFGGGTKLTVLASTKGPSVFPLAPSSKSTSGGTAALGCLVKDYFPEPVTVSWNSGALTSGVHTFPAVLQSSGLYSLSSVVTVPSSSLGTQTYICNVNHKPSNTKVDKKVEPKSCDKTHTCPPCPAPELLGGPSVFLFPPKPKDTLMISRTPEVTCVVVDVSHEDPEVKFNWYVDGVEVHNAKTKPREEQYNSTYRVVSVLTVLHQDWLNGKEYKCKVSNKALPAPIEKTISKAKGQPREPQVYTLPPSREEMTKNQVSLTCLVKGFYPSDIAVEWESNGQPENNYKTTPPVLDSDGSFFLYSKLTVDKSRWQQGNVFSCSVMHEALHNHYTQKSLSLSPGKGGGGSGGGGSGGGGSKESCDVQLYIKRQSEHSILAGDPFELECPVKYCANRPHVTWCKLNGTTCVKLEDRQTSWKEEKNISFFILHFEPVLPNDNGSYRCSANFQSNLIESHSTTLYVTDVKSASERPSKDEMAS

SEQ ID NO: 730 - protein, 639 aa, Artificial Sequence
  Description of Artificial Sequence: Synthetic polypeptide
QVQLVESGGGLVKPGESLRLSCAASGFTFSDYYMYWVRQAPGKGLEWVAIISDGGYYTYYSDIIKGRFTISRDNAKNSLYLQMNSLKAEDTAVYYCARGFPLLRHGAMDYWGQGTLVTVSSGGGGSGGGGSGGGGSDIQMTQSPSSLSASVGDRVTITCKASQNVDTNVAWYQQKPGQAPKSLIYSASYRYSDVPSRFSGSASGTDFTLTISSVQSEDFATYYCQQYDSYPYTFGGGTKLEIKSGGGGSEVQLVESGGGLVQPGGSLKLSCAASGFTFNKYAMNWVRQAPGKGLEWVARIRSKYNNYATYYADSVKDRFTISRDDSKNTAYLQMNNLKTEDTAVYYCVRHGNFGNSYISYWAYWGQGTLVTVSSGGGGSGGGGSGGGGSQTVVTQEPSLTVSPGGTVTLTCGSSTGAVTSGNYPNWVQQKPGQAPRGLIGGTKFLAPGTPARFSGSLLGGKAALTLSGVQPEDEAEYYCVLWYSNRWVFGGGTKLTVLGGGGSGGGGSGGGGSKESCDVQLYIKRQSEHSILAGDPFELECPVKYCANRPHVTWCKLNGTTCVKLEDRQTSWKEEKNISFFILHFEPVLPNDNGSYRCSANFQSNLIESHSTTLYVTDVKSASERPSKDEMASHHHHHH

SEQ ID NO: 731 - protein, 993 aa, Artificial Sequence
  Description of Artificial Sequence: Synthetic polypeptide
DIQLTQSPASLAVSLGQRATISCKASQSVDYDGDSYLNWYQQIPGQPPKLLIYDASNLVSGIPPRFSGSGSGTDFTLNIHPVEKVDAATYHCQQSTEDPWTFGGGTKLEIKGGGGSGGGGSGGGGSQVQLQQSGAELVRPGSSVKISCKASGYAFSSYWMNWVKQRPGQGLEWIGQIWPGDGDTNYNGKFKGKATLTADESSSTAYMQLSSLASEDSAVYFCARRETTTVGRYYYAMDYWGQGTTVTVSSGGGGSDIKLQQSGAELARPGASVKMSCKTSGYTFTRYTMHWVKQRPGQGLEWIGYINPSRGYTNYNQKFKDKATLTTDKSSSTAYMQLSSLTSEDSAVYYCARYYDDHYCLDYWGQGTTLTVSSVEGGSGGSGGSGGSGGVDDIQLTQSPAIMSASPGEKVTMTCRASSSVSYMNWYQQKSGTSPKRWIYDTSKVASGVPYRFSGSGSGTSYSLTISSMEAEDAATYYCQQWSSNPLTFGAGTKLELKASTKGPSVFPLAPSSKSTSGGTAALGCLVKDYFPEPVTVSWNSGALTSGVHTFPAVLQSSGLYSLSSVVTVPSSSLGTQTYICNVNHKPSNTKVDKKVEPKSCDKTHTCPPCPAPELLGGPSVFLFPPKPKDTLMISRTPEVTCVVVDVSHEDPEVKFNWYVDGVEVHNAKTKPREEQYNSTYRVVSVLTVLHQDWLNGKEYKCKVSNKALPAPIEKTISKAKGQPREPQVYTLPPSREEMTKNQVSLTCLVKGFYPSDIAVEWESNGQPENNYKTTPPVLDSDGSFFLYSKLTVDKSRWQQGNVFSCSVMHEALHNHYTQKSLSLSPGKGGGGSGGGGSGGGGSPGWFLDSPDRPWNPPTFSPALLVVTEGDNATFTCSFSNTSESFVLNWYRMSPSNQTDKLAAFPEDRSQPGQDCRFRVTQLPNGRDFHMSVVRARRNDSGTYLCGAISLAPKAQIKESLRAELRVTERRAEVPTAHPSPSPRPAGQFQTLV

SEQ ID NO: 732 - protein, 669 aa, Artificial Sequence
  Description of Artificial Sequence: Synthetic polypeptide
DIQLTQSPASLAVSLGQRATISCKASQSVDYDGDSYLNWYQQIPGQPPKLLIYDASNLVSGIPPRFSGSGSGTDFTLNIHPVEKVDAATYHCQQSTEDPWTFGGGTKLEIKGGGGSGGGGSGGGGSQVQLQQSGAELVRPGSSVKISCKASGYAFSSYWMNWVKQRPGQGLEWIGQIWPGDGDTNYNGKFKGKATLTADESSSTAYMQLSSLASEDSAVYFCARRETTTVGRYYYAMDYWGQGTTVTVSSGGGGSDIKLQQSGAELARPGASVKMSCKTSGYTFTRYTMHWVKQRPGQGLEWIGYINPSRGYTNYNQKFKDKATLTTDKSSSTAYMQLSSLTSEDSAVYYCARYYDDHYCLDYWGQGTTLTVSSVEGGSGGSGGSGGSGGVDDIQLTQSPAIMSASPGEKVTMTCRASSSVSYMNWYQQKSGTSPKRWIYDTSKVASGVPYRFSGSGSGTSYSLTISSMEAEDAATYYCQQWSSNPLTFGAGTKLELKGGGGSGGGGSGGGGSPGWFLDSPDRPWNPPTFSPALLVVTEGDNATFTCSFSNTSESFVLNWYRMSPSNQTDKLAAFPEDRSQPGQDCRFRVTQLPNGRDFHMSVVRARRNDSGTYLCGAISLAPKAQIKESLRAELRVTERRAEVPTAHPSPSPRPAGQFQTLVHHHHHH

SEQ ID NO: 733 - protein, 993 aa, Artificial Sequence
  Description of Artificial Sequence: Synthetic polypeptide
QVQLVESGGGLVKPGESLRLSCAASGFTFSDYYMYWVRQAPGKGLEWVAIISDGGYYTYYSDIIKGRFTISRDNAKNSLYLQMNSLKAEDTAVYYCARGFPLLRHGAMDYWGQGTLVTVSSGGGGSGGGGSGGGGSDIQMTQSPSSLSASVGDRVTITCKASQNVDTNVAWYQQKPGQAPKSLIYSASYRYSDVPSRFSGSASGTDFTLTISSVQSEDFATYYCQQYDSYPYTFGGGTKLEIKSGGGGSEVQLVESGGGLVQPGGSLKLSCAASGFTFNKYAMNWVRQAPGKGLEWVARIRSKYNNYATYYADSVKDRFTISRDDSKNTAYLQMNNLKTEDTAVYYCVRHGNFGNSYISYWAYWGQGTLVTVSSGGGGSGGGGSGGGGSQTVVTQEPSLTVSPGGTVTLTCGSSTGAVTSGNYPNWVQQKPGQAPRGLIGGTKFLAPGTPARFSGSLLGGKAALTLSGVQPEDEAEYYCVLWYSNRWVFGGGTKLTVLASTKGPSVFPLAPSSKSTSGGTAALGCLVKDYFPEPVTVSWNSGALTSGVHTFPAVLQSSGLYSLSSVVTVPSSSLGTQTYICNVNHKPSNTKVDKKVEPKSCDKTHTCPPCPAPELLGGPSVFLFPPKPKDTLMISRTPEVTCVVVDVSHEDPEVKFNWYVDGVEVHNAKTKPREEQYNSTYRVVSVLTVLHQDWLNGKEYKCKVSNKALPAPIEKTISKAKGQPREPQVYTLPPSREEMTKNQVSLTCLVKGFYPSDIAVEWESNGQPENNYKTTPPVLDSDGSFFLYSKLTVDKSRWQQGNVFSCSVMHEALHNHYTQKSLSLSPGKGGGGSGGGGSGGGGSPGWFLDSPDRPWNPPTFSPALLVVTEGDNATFTCSFSNTSESFVLNWYRMSPSNQTDKLAAFPEDRSQPGQDCRFRVTQLPNGRDFHMSVVRARRNDSGTYLCGAISLAPKAQIKESLRAELRVTERRAEVPTAHPSPSPRPAGQFQTLV

SEQ ID NO: 734 - protein, 669 aa, Artificial Sequence
  Description of Artificial Sequence: Synthetic polypeptide
QVQLVESGGGLVKPGESLRLSCAASGFTFSDYYMYWVRQAPGKGLEWVAIISDGGYYTYYSDIIKGRFTISRDNAKNSLYLQMNSLKAEDTAVYYCARGFPLLRHGAMDYWGQGTLVTVSSGGGGSGGGGSGGGGSDIQMTQSPSSLSASVGDRVTITCKASQNVDTNVAWYQQKPGQAPKSLIYSASYRYSDVPSRFSGSASGTDFTLTISSVQSEDFATYYCQQYDSYPYTFGGGTKLEIKSGGGGSEVQLVESGGGLVQPGGSLKLSCAASGFTFNKYAMNWVRQAPGKGLEWVARIRSKYNNYATYYADSVKDRFTISRDDSKNTAYLQMNNLKTEDTAVYYCVRHGNFGNSYISYWAYWGQGTLVTVSSGGGGSGGGGSGGGGSQTVVTQEPSLTVSPGGTVTLTCGSSTGAVTSGNYPNWVQQKPGQAPRGLIGGTKFLAPGTPARFSGSLLGGKAALTLSGVQPEDEAEYYCVLWYSNRWVFGGGTKLTVLGGGGSGGGGSGGGGSPGWFLDSPDRPWNPPTFSPALLVVTEGDNATFTCSFSNTSESFVLNWYRMSPSNQTDKLAAFPEDRSQPGQDCRFRVTQLPNGRDFHMSVVRARRNDSGTYLCGAISLAPKAQIKESLRAELRVTERRAEVPTAHPSPSPRPAGQFQTLVHHHHHH

SEQ ID NO: 735 - protein, 1373 aa, Artificial Sequence
  Description of Artificial Sequence: Synthetic polypeptide
DIQLTQSPASLAVSLGQRATISCKASQSVDYDGDSYLNWYQQIPGQPPKLLIYDASNLVSGIPPRFSGSGSGTDFTLNIHPVEKVDAATYHCQQSTEDPWTFGGGTKLEIKGGGGSGGGGSGGGGSQVQLQQSGAELVRPGSSVKISCKASGYAFSSYWMNWVKQRPGQGLEWIGQIWPGDGDTNYNGKFKGKATLTADESSSTAYMQLSSLASEDSAVYFCARRETTTVGRYYYAMDYWGQGTTVTVSSGGGGSDIKLQQSGAELARPGASVKMSCKTSGYTFTRYTMHWVKQRPGQGLEWIGYINPSRGYTNYNQKFKDKATLTTDKSSSTAYMQLSSLTSEDSAVYYCARYYDDHYCLDYWGQGTTLTVSSVEGGSGGSGGSGGSGGVDDIQLTQSPAIMSASPGEKVTMTCRASSSVSYMNWYQQKSGTSPKRWIYDTSKVASGVPYRFSGSGSGTSYSLTISSMEAEDAATYYCQQWSSNPLTFGAGTKLELKASTKGPSVFPLAPSSKSTSGGTAALGCLVKDYFPEPVTVSWNSGALTSGVHTFPAVLQSSGLYSLSSVVTVPSSSLGTQTYICNVNHKPSNTKVDKKVEPKSCDKTHTCPPCPAPELLGGPSVFLFPPKPKDTLMISRTPEVTCVVVDVSHEDPEVKFNWYVDGVEVHNAKTKPREEQYNSTYRVVSVLTVLHQDWLNGKEYKCKVSNKALPAPIEKTISKAKGQPREPQVYTLPPSREEMTKNQVSLTCLVKGFYPSDIAVEWESNGQPENNYKTTPPVLDSDGSFFLYSKLTVDKSRWQQGNVFSCSVMHEALHNHYTQKSLSLSPGKGGGGSGGGGSGGGGSMDGRFWIRVQESVMVPEGLCISVPCSFSYPRQDWTGSTPAYGYWFKAVTETTKGAPVATNHQSREVEMSTRGRFQLTGDPAKGNCSLVIRDAQMQDESQYFFRVERGSYVRYNFMNDGFFLKVTALTQKPDVYIPETLEPGQPVTVICVFNWAFEECPPPSFSWTGAALSSQGTKPTTSHFSVLSFTPRPQDHNTDLTCHVDFSRKGVSAQRTVRLRVAYAPRDLVISISRDNTPALEPQPQGNVPYLEAQKGQFLRLLCAADSQPPATLSWVLQNRVLSSSHPWGPRPLGLELPGVKAGDSGRYTCRAENRLGSQQRALDLSVQYPPENLRVMVSQANRTVLENLGNGTSLPVLEGQSLCLVCVTHSSPPARLSWTQRGQVLSPSQPSDPGVLELPRVQVEHEGEFTCHARHPLGSQHVSLSLSVHYSPKLLGPSCSWEAEGLHCSCSSQASPAPSLRWWLGEELLEGNSSQDSFEVTPSSAGPWANSSLSLHGGLSSGLRLRCEAWNVHGAQSGSILQLPDKKGLIST

SEQ ID NO: 736 - protein, 1049 aa, Artificial Sequence
  Description of Artificial Sequence: Synthetic polypeptide
DIQLTQSPASLAVSLGQRATISCKASQSVDYDGDSYLNWYQQIPGQPPKLLIYDASNLVSGIPPRFSGSGSGTDFTLNIHPVEKVDAATYHCQQSTEDPWTFGGGTKLEIKGGGGSGGGGSGGGGSQVQLQQSGAELVRPGSSVKISCKASGYAFSSYWMNWVKQRPGQGLEWIGQIWPGDGDTNYNGKFKGKATLTADESSSTAYMQLSSLASEDSAVYFCARRETTTVGRYYYAMDYWGQGTTVTVSSGGGGSDIKLQQSGAELARPGASVKMSCKTSGYTFTRYTMHWVKQRPGQGLEWIGYINPSRGYTNYNQKFKDKATLTTDKSSSTAYMQLSSLTSEDSAVYYCARYYDDHYCLDYWGQGTTLTVSSVEGGSGGSGGSGGSGGVDDIQLTQSPAIMSASPGEKVTMTCRASSSVSYMNWYQQKSGTSPKRWIYDTSKVASGVPYRFSGSGSGTSYSLTISSMEAEDAATYYCQQWSSNPLTFGAGTKLELKGGGGSGGGGSGGGGSMDGRFWIRVQESVMVPEGLCISVPCSFSYPRQDWTGSTPAYGYWFKAVTETTKGAPVATNHQSREVEMSTRGRFQLTGDPAKGNCSLVIRDAQMQDESQYFFRVERGSYVRYNFMNDGFFLKVTALTQKPDVYIPETLEPGQPVTVICVFNWAFEECPPPSFSWTGAALSSQGTKPTTSHFSVLSFTPRPQDHNTDLTCHVDFSRKGVSAQRTVRLRVAYAPRDLVISISRDNTPALEPQPQGNVPYLEAQKGQFLRLLCAADSQPPATLSWVLQNRVLSSSHPWGPRPLGLELPGVKAGDSGRYTCRAENRLGSQQRALDLSVQYPPENLRVMVSQANRTVLENLGNGTSLPVLEGQSLCLVCVTHSSPPARLSWTQRGQVLSPSQPSDPGVLELPRVQVEHEGEFTCHARHPLGSQHVSLSLSVHYSPKLLGPSCSWEAEGLHCSCSSQASPAPSLRWWLGEELLEGNSSQDSFEVTPSSAGPWANSSLSLHGGLSSGLRLRCEAWNVHGAQSGSILQLPDKKGLISTHHHHHH

SEQ ID NO: 737 - protein, 1373 aa, Artificial Sequence
  Description of Artificial Sequence: Synthetic polypeptide
QVQLVESGGGLVKPGESLRLSCAASGFTFSDYYMYWVRQAPGKGLEWVAIISDGGYYTYYSDIIKGRFTISRDNAKNSLYLQMNSLKAEDTAVYYCARGFPLLRHGAMDYWGQGTLVTVSSGGGGSGGGGSGGGGSDIQMTQSPSSLSASVGDRVTITCKASQNVDTNVAWYQQKPGQAPKSLIYSASYRYSDVPSRFSGSASGTDFTLTISSVQSEDFATYYCQQYDSYPYTFGGGTKLEIKSGGGGSEVQLVESGGGLVQPGGSLKLSCAASGFTFNKYAMNWVRQAPGKGLEWVARIRSKYNNYATYYADSVKDRFTISRDDSKNTAYLQMNNLKTEDTAVYYCVRHGNFGNSYISYWAYWGQGTLVTVSSGGGGSGGGGSGGGGSQTVVTQEPSLTVSPGGTVTLTCGSSTGAVTSGNYPNWVQQKPGQAPRGLIGGTKFLAPGTPARFSGSLLGGKAALTLSGVQPEDEAEYYCVLWYSNRWVFGGGTKLTVLASTKGPSVFPLAPSSKSTSGGTAALGCLVKDYFPEPVTVSWNSGALTSGVHTFPAVLQSSGLYSLSSVVTVPSSSLGTQTYICNVNHKPSNTKVDKKVEPKSCDKTHTCPPCPAPELLGGPSVFLFPPKPKDTLMISRTPEVTCVVVDVSHEDPEVKFNWYVDGVEVHNAKTKPREEQYNSTYRVVSVLTVLHQDWLNGKEYKCKVSNKALPAPIEKTISKAKGQPREPQVYTLPPSREEMTKNQVSLTCLVKGFYPSDIAVEWESNGQPENNYKTTPPVLDSDGSFFLYSKLTVDKSRWQQGNVFSCSVMHEALHNHYTQKSLSLSPGKGGGGSGGGGSGGGGSMDGRFWIRVQESVMVPEGLCISVPCSFSYPRQDWTGSTPAYGYWFKAVTETTKGAPVATNHQSREVEMSTRGRFQLTGDPAKGNCSLVIRDAQMQDESQYFFRVERGSYVRYNFMNDGFFLKVTALTQKPDVYIPETLEPGQPVTVICVFNWAFEECPPPSFSWTGAALSSQGTKPTTSHFSVLSFTPRPQDHNTDLTCHVDFSRKGVSAQRTVRLRVAYAPRDLVISISRDNTPALEPQPQGNVPYLEAQKGQFLRLLCAADSQPPATLSWVLQNRVLSSSHPWGPRPLGLELPGVKAGDSGRYTCRAENRLGSQQRALDLSVQYPPENLRVMVSQANRTVLENLGNGTSLPVLEGQSLCLVCVTHSSPPARLSWTQRGQVLSPSQPSDPGVLELPRVQVEHEGEFTCHARHPLGSQHVSLSLSVHYSPKLLGPSCSWEAEGLHCSCSSQASPAPSLRWWLGEELLEGNSSQDSFEVTPSSAGPWANSSLSLHGGLSSGLRLRCEAWNVHGAQSGSILQLPDKKGLIST

SEQ ID NO: 738 - protein, 1049 aa, Artificial Sequence
  Description of Artificial Sequence: Synthetic polypeptide
QVQLVESGGGLVKPGESLRLSCAASGFTFSDYYMYWVRQAPGKGLEWVAIISDGGYYTYYSDIIKGRFTISRDNAKNSLYLQMNSLKAEDTAVYYCARGFPLLRHGAMDYWGQGTLVTVSSGGGGSGGGGSGGGGSDIQMTQSPSSLSASVGDRVTITCKASQNVDTNVAWYQQKPGQAPKSLIYSASYRYSDVPSRFSGSASGTDFTLTISSVQSEDFATYYCQQYDSYPYTFGGGTKLEIKSGGGGSEVQLVESGGGLVQPGGSLKLSCAASGFTFNKYAMNWVRQAPGKGLEWVARIRSKYNNYATYYADSVKDRFTISRDDSKNTAYLQMNNLKTEDTAVYYCVRHGNFGNSYISYWAYWGQGTLVTVSSGGGGSGGGGSGGGGSQTVVTQEPSLTVSPGGTVTLTCGSSTGAVTSGNYPNWVQQKPGQAPRGLIGGTKFLAPGTPARFSGSLLGGKAALTLSGVQPEDEAEYYCVLWYSNRWVFGGGTKLTVLGGGGSGGGGSGGGGSMDGRFWIRVQESVMVPEGLCISVPCSFSYPRQDWTGSTPAYGYWFKAVTETTKGAPVATNHQSREVEMSTRGRFQLTGDPAKGNCSLVIRDAQMQDESQYFFRVERGSYVRYNFMNDGFFLKVTALTQKPDVYIPETLEPGQPVTVICVFNWAFEECPPPSFSWTGAALSSQGTKPTTSHFSVLSFTPRPQDHNTDLTCHVDFSRKGVSAQRTVRLRVAYAPRDLVISISRDNTPALEPQPQGNVPYLEAQKGQFLRLLCAADSQPPATLSWVLQNRVLSSSHPWGPRPLGLELPGVKAGDSGRYTCRAENRLGSQQRALDLSVQYPPENLRVMVSQANRTVLENLGNGTSLPVLEGQSLCLVCVTHSSPPARLSWTQRGQVLSPSQPSDPGVLELPRVQVEHEGEFTCHARHPLGSQHVSLSLSVHYSPKLLGPSCSWEAEGLHCSCSSQASPAPSLRWWLGEELLEGNSSQDSFEVTPSSAGPWANSSLSLHGGLSSGLRLRCEAWNVHGAQSGSILQLPDKKGLISTHHHHHH

SEQ ID NO: 739 - protein, 962 aa, Artificial Sequence
  Description of Artificial Sequence: Synthetic polypeptide
DIQLTQSPASLAVSLGQRATISCKASQSVDYDGDSYLNWYQQIPGQPPKLLIYDASNLVSGIPPRFSGSGSGTDFTLNIHPVEKVDAATYHCQQSTEDPWTFGGGTKLEIKGGGGSGGGGSGGGGSQVQLQQSGAELVRPGSSVKISCKASGYAFSSYWMNWVKQRPGQGLEWIGQIWPGDGDTNYNGKFKGKATLTADESSSTAYMQLSSLASEDSAVYFCARRETTTVGRYYYAMDYWGQGTTVTVSSGGGGSDIKLQQSGAELARPGASVKMSCKTSGYTFTRYTMHWVKQRPGQGLEWIGYINPSRGYTNYNQKFKDKATLTTDKSSSTAYMQLSSLTSEDSAVYYCARYYDDHYCLDYWGQGTTLTVSSVEGGSGGSGGSGGSGGVDDIQLTQSPAIMSASPGEKVTMTCRASSSVSYMNWYQQKSGTSPKRWIYDTSKVASGVPYRFSGSGSGTSYSLTISSMEAEDAATYYCQQWSSNPLTFGAGTKLELKASTKGPSVFPLAPSSKSTSGGTAALGCLVKDYFPEPVTVSWNSGALTSGVHTFPAVLQSSGLYSLSSVVTVPSSSLGTQTYICNVNHKPSNTKVDKKVEPKSCDKTHTCPPCPAPELLGGPSVFLFPPKPKDTLMISRTPEVTCVVVDVSHEDPEVKFNWYVDGVEVHNAKTKPREEQYNSTYRVVSVLTVLHQDWLNGKEYKCKVSNKALPAPIEKTISKAKGQPREPQVYTLPPSREEMTKNQVSLTCLVKGFYPSDIAVEWESNGQPENNYKTTPPVLDSDGSFFLYSKLTVDKSRWQQGNVFSCSVMHEALHNHYTQKSLSLSPGKGGGGSGGGGSGGGGSEEELQVIQPDKSVLVAAGETATLRCTATSLIPVGPIQWFRGAGPGRELIYNQKEGHFPRVTTVSDLTKRNNMDFSIRIGNITPADAGTYYCVKFRKGSPDDVEFKSGAGTELSVRAKPS

SEQ ID NO: 740 - protein, 638 aa, Artificial Sequence
  Description of Artificial Sequence: Synthetic polypeptide
DIQLTQSPASLAVSLGQRATISCKASQSVDYDGDSYLNWYQQIPGQPPKLLIYDASNLVSGIPPRFSGSGSGTDFTLNIHPVEKVDAATYHCQQSTEDPWTFGGGTKLEIKGGGGSGGGGSGGGGSQVQLQQSGAELVRPGSSVKISCKASGYAFSSYWMNWVKQRPGQGLEWIGQIWPGDGDTNYNGKFKGKATLTADESSSTAYMQLSSLASEDSAVYFCARRETTTVGRYYYAMDYWGQGTTVTVSSGGGGSDIKLQQSGAELARPGASVKMSCKTSGYTFTRYTMHWVKQRPGQGLEWIGYINPSRGYTNYNQKFKDKATLTTDKSSSTAYMQLSSLTSEDSAVYYCARYYDDHYCLDYWGQGTTLTVSSVEGGSGGSGGSGGSGGVDDIQLTQSPAIMSASPGEKVTMTCRASSSVSYMNWYQQKSGTSPKRWIYDTSKVASGVPYRFSGSGSGTSYSLTISSMEAEDAATYYCQQWSSNPLTFGAGTKLELKGGGGSGGGGSGGGGSEEELQVIQPDKSVLVAAGETATLRCTATSLIPVGPIQWFRGAGPGRELIYNQKEGHFPRVTTVSDLTKRNNMDFSIRIGNITPADAGTYYCVKFRKGSPDDVEFKSGAGTELSVRAKPSHHHHHH

SEQ ID NO: 741 - protein, 962 aa, Artificial Sequence
  Description of Artificial Sequence: Synthetic polypeptide
QVQLVESGGGLVKPGESLRLSCAASGFTFSDYYMYWVRQAPGKGLEWVAIISDGGYYTYYSDIIKGRFTISRDNAKNSLYLQMNSLKAEDTAVYYCARGFPLLRHGAMDYWGQGTLVTVSSGGGGSGGGGSGGGGSDIQMTQSPSSLSASVGDRVTITCKASQNVDTNVAWYQQKPGQAPKSLIYSASYRYSDVPSRFSGSASGTDFTLTISSVQSEDFATYYCQQYDSYPYTFGGGTKLEIKSGGGGSEVQLVESGGGLVQPGGSLKLSCAASGFTFNKYAMNWVRQAPGKGLEWVARIRSKYNNYATYYADSVKDRFTISRDDSKNTAYLQMNNLKTEDTAVYYCVRHGNFGNSYISYWAYWGQGTLVTVSSGGGGSGGGGSGGGGSQTVVTQEPSLTVSPGGTVTLTCGSSTGAVTSGNYPNWVQQKPGQAPRGLIGGTKFLAPGTPARFSGSLLGGKAALTLSGVQPEDEAEYYCVLWYSNRWVFGGGTKLTVLASTKGPSVFPLAPSSKSTSGGTAALGCLVKDYFPEPVTVSWNSGALTSGVHTFPAVLQSSGLYSLSSVVTVPSSSLGTQTYICNVNHKPSNTKVDKKVEPKSCDKTHTCPPCPAPELLGGPSVFLFPPKPKDTLMISRTPEVTCVVVDVSHEDPEVKFNWYVDGVEVHNAKTKPREEQYNSTYRVVSVLTVLHQDWLNGKEYKCKVSNKALPAPIEKTISKAKGQPREPQVYTLPPSREEMTKNQVSLTCLVKGFYPSDIAVEWESNGQPENNYKTTPPVLDSDGSFFLYSKLTVDKSRWQQGNVFSCSVMHEALHNHYTQKSLSLSPGKGGGGSGGGGSGGGGSEEELQVIQPDKSVLVAAGETATLRCTATSLIPVGPIQWFRGAGPGRELIYNQKEGHFPRVTTVSDLTKRNNMDFSIRIGNITPADAGTYYCVKFRKGSPDDVEFKSGAGTELSVRAKPS

SEQ ID NO: 742 - protein, 638 aa, Artificial Sequence
  Description of Artificial Sequence: Synthetic polypeptide
QVQLVESGGGLVKPGESLRLSCAASGFTFSDYYMYWVRQAPGKGLEWVAIISDGGYYTYYSDIIKGRFTISRDNAKNSLYLQMNSLKAEDTAVYYCARGFPLLRHGAMDYWGQGTLVTVSSGGGGSGGGGSGGGGSDIQMTQSPSSLSASVGDRVTITCKASQNVDTNVAWYQQKPGQAPKSLIYSASYRYSDVPSRFSGSASGTDFTLTISSVQSEDFATYYCQQYDSYPYTFGGGTKLEIKSGGGGSEVQLVESGGGLVQPGGSLKLSCAASGFTFNKYAMNWVRQAPGKGLEWVARIRSKYNNYATYYADSVKDRFTISRDDSKNTAYLQMNNLKTEDTAVYYCVRHGNFGNSYISYWAYWGQGTLVTVSSGGGGSGGGGSGGGGSQTVVTQEPSLTVSPGGTVTLTCGSSTGAVTSGNYPNWVQQKPGQAPRGLIGGTKFLAPGTPARFSGSLLGGKAALTLSGVQPEDEAEYYCVLWYSNRWVFGGGTKLTVLGGGGSGGGGSGGGGSEEELQVIQPDKSVLVAAGETATLRCTATSLIPVGPIQWFRGAGPGRELIYNQKEGHFPRVTTVSDLTKRNNMDFSIRIGNITPADAGTYYCVKFRKGSPDDVEFKSGAGTELSVRAKPSHHHHHH

SEQ ID NO: 743 - protein, 1024 aa, Artificial Sequence
  Description of Artificial Sequence: Synthetic polypeptide
DIQLTQSPASLAVSLGQRATISCKASQSVDYDGDSYLNWYQQIPGQPPKLLIYDASNLVSGIPPRFSGSGSGTDFTLNIHPVEKVDAATYHCQQSTEDPWTFGGGTKLEIKGGGGSGGGGSGGGGSQVQLQQSGAELVRPGSSVKISCKASGYAFSSYWMNWVKQRPGQGLEWIGQIWPGDGDTNYNGKFKGKATLTADESSSTAYMQLSSLASEDSAVYFCARRETTTVGRYYYAMDYWGQGTTVTVSSGGGGSDIKLQQSGAELARPGASVKMSCKTSGYTFTRYTMHWVKQRPGQGLEWIGYINPSRGYTNYNQKFKDKATLTTDKSSSTAYMQLSSLTSEDSAVYYCARYYDDHYCLDYWGQGTTLTVSSVEGGSGGSGGSGGSGGVDDIQLTQSPAIMSASPGEKVTMTCRASSSVSYMNWYQQKSGTSPKRWIYDTSKVASGVPYRFSGSGSGTSYSLTISSMEAEDAATYYCQQWSSNPLTFGAGTKLELKASTKGPSVFPLAPSSKSTSGGTAALGCLVKDYFPEPVTVSWNSGALTSGVHTFPAVLQSSGLYSLSSVVTVPSSSLGTQTYICNVNHKPSNTKVDKKVEPKSCDKTHTCPPCPAPELLGGPSVFLFPPKPKDTLMISRTPEVTCVVVDVSHEDPEVKFNWYVDGVEVHNAKTKPREEQYNSTYRVVSVLTVLHQDWLNGKEYKCKVSNKALPAPIEKTISKAKGQPREPQVYTLPPSREEMTKNQVSLTCLVKGFYPSDIAVEWESNGQPENNYKTTPPVLDSDGSFFLYSKLTVDKSRWQQGNVFSCSVMHEALHNHYTQKSLSLSPGKGGGGSGGGGSGGGGSSEVEYRAEVGQNAYLPCFYTPAAPGNLVPVCWGKGACPVFECGNVVLRTDERDVNYWTSRYWLNGDFRKGDVSLTIENVTLADSGIYCCRIQIPGIMNDEKFNLKLVIKPAKVTPAPTRQRDFTAAFPRMLTTRGHGPAETQTLGSLPDINLTQISTLANELRDSRLANDLRDSGATIRIG

SEQ ID NO: 744 - protein, 700 aa, Artificial Sequence
  Description of Artificial Sequence: Synthetic polypeptide
DIQLTQSPASLAVSLGQRATISCKASQSVDYDGDSYLNWYQQIPGQPPKLLIYDASNLVSGIPPRFSGSGSGTDFTLNIHPVEKVDAATYHCQQSTEDPWTFGGGTKLEIKGGGGSGGGGSGGGGSQVQLQQSGAELVRPGSSVKISCKASGYAFSSYWMNWVKQRPGQGLEWIGQIWPGDGDTNYNGKFKGKATLTADESSSTAYMQLSSLASEDSAVYFCARRETTTVGRYYYAMDYWGQGTTVTVSSGGGGSDIKLQQSGAELARPGASVKMSCKTSGYTFTRYTMHWVKQRPGQGLEWIGYINPSRGYTNYNQKFKDKATLTTDKSSSTAYMQLSSLTSEDSAVYYCARYYDDHYCLDYWGQGTTLTVSSVEGGSGGSGGSGGSGGVDDIQLTQSPAIMSASPGEKVTMTCRASSSVSYMNWYQQKSGTSPKRWIYDTSKVASGVPYRFSGSGSGTSYSLTISSMEAEDAATYYCQQWSSNPLTFGAGTKLELKGGGGSGGGGSGGGGSSEVEYRAEVGQNAYLPCFYTPAAPGNLVPVCWGKGACPVFECGNVVLRTDERDVNYWTSRYWLNGDFRKGDVSLTIENVTLADSGIYCCRIQIPGIMNDEKFNLKLVIKPAKVTPAPTRQRDFTAAFPRMLTTRGHGPAETQTLGSLPDINLTQISTLANELRDSRLANDLRDSGATIRIGHHHHHH

SEQ ID NO: 745 - protein, 1024 aa, Artificial Sequence
  Description of Artificial Sequence: Synthetic polypeptide
QVQLVESGGGLVKPGESLRLSCAASGFTFSDYYMYWVRQAPGKGLEWVAIISDGGYYTYYSDIIKGRFTISRDNAKNSLYLQMNSLKAEDTAVYYCARGFPLLRHGAMDYWGQGTLVTVSSGGGGSGGGGSGGGGSDIQMTQSPSSLSASVGDRVTITCKASQNVDTNVAWYQQKPGQAPKSLIYSASYRYSDVPSRFSGSASGTDFTLTISSVQSEDFATYYCQQYDSYPYTFGGGTKLEIKSGGGGSEVQLVESGGGLVQPGGSLKLSCAASGFTFNKYAMNWVRQAPGKGLEWVARIRSKYNNYATYYADSVKDRFTISRDDSKNTAYLQMNNLKTEDTAVYYCVRHGNFGNSYISYWAYWGQGTLVTVSSGGGGSGGGGSGGGGSQTVVTQEPSLTVSPGGTVTLTCGSSTGAVTSGNYPNWVQQKPGQAPRGLIGGTKFLAPGTPARFSGSLLGGKAALTLSGVQPEDEAEYYCVLWYSNRWVFGGGTKLTVLASTKGPSVFPLAPSSKSTSGGTAALGCLVKDYFPEPVTVSWNSGALTSGVHTFPAVLQSSGLYSLSSVVTVPSSSLGTQTYICNVNHKPSNTKVDKKVEPKSCDKTHTCPPCPAPELLGGPSVFLFPPKPKDTLMISRTPEVTCVVVDVSHEDPEVKFNWYVDGVEVHNAKTKPREEQYNSTYRVVSVLTVLHQDWLNGKEYKCKVSNKALPAPIEKTISKAKGQPREPQVYTLPPSREEMTKNQVSLTCLVKGFYPSDIAVEWESNGQPENNYKTTPPVLDSDGSFFLYSKLTVDKSRWQQGNVFSCSVMHEALHNHYTQKSLSLSPGKGGGGSGGGGSGGGGSSEVEYRAEVGQNAYLPCFYTPAAPGNLVPVCWGKGACPVFECGNVVLRTDERDVNYWTSRYWLNGDFRKGDVSLTIENVTLADSGIYCCRIQIPGIMNDEKFNLKLVIKPAKVTPAPTRQRDFTAAFPRMLTTRGHGPAETQTLGSLPDINLTQISTLANELRDSRLANDLRDSGATIRIG

SEQ ID NO: 746 - protein, 700 aa, Artificial Sequence
  Description of Artificial Sequence: Synthetic polypeptide
QVQLVESGGGLVKPGESLRLSCAASGFTFSDYYMYWVRQAPGKGLEWVAIISDGGYYTYYSDIIKGRFTISRDNAKNSLYLQMNSLKAEDTAVYYCARGFPLLRHGAMDYWGQGTLVTVSSGGGGSGGGGSGGGGSDIQMTQSPSSLSASVGDRVTITCKASQNVDTNVAWYQQKPGQAPKSLIYSASYRYSDVPSRFSGSASGTDFTLTISSVQSEDFATYYCQQYDSYPYTFGGGTKLEIKSGGGGSEVQLVESGGGLVQPGGSLKLSCAASGFTFNKYAMNWVRQAPGKGLEWVARIRSKYNNYATYYADSVKDRFTISRDDSKNTAYLQMNNLKTEDTAVYYCVRHGNFGNSYISYWAYWGQGTLVTVSSGGGGSGGGGSGGGGSQTVVTQEPSLTVSPGGTVTLTCGSSTGAVTSGNYPNWVQQKPGQAPRGLIGGTKFLAPGTPARFSGSLLGGKAALTLSGVQPEDEAEYYCVLWYSNRWVFGGGTKLTVLGGGGSGGGGSGGGGSSEVEYRAEVGQNAYLPCFYTPAAPGNLVPVCWGKGACPVFECGNVVLRTDERDVNYWTSRYWLNGDFRKGDVSLTIENVTLADSGIYCCRIQIPGIMNDEKFNLKLVIKPAKVTPAPTRQRDFTAAFPRMLTTRGHGPAETQTLGSLPDINLTQISTLANELRDSRLANDLRDSGATIRIGHHHHHH

SEQ ID NO: 747 - protein, 586 aa, Artificial Sequence
  Description of Artificial Sequence: Synthetic polypeptide
QVQLVQSGAEVKKPGASVKVSCKASGYTFTEFGMNWVRQAPGQGLEWMGWINTKTGEATYVEEFKGRVTFTTDTSTSTAYMELRSLRSDDTAVYYCARWDFAYYVEAMDYWGQGTTVTVSSASTKGPSVFPLAPSSKSTSGGTAALGCLVKDYFPEPVTVSWNSGALTSGVHTFPAVLQSSGLYSLSSVVTVPSSSLGTQTYICNVNHKPSNTKVDKKVEPKSCDKTHTCPPCPAPEAAGGPSVFLFPPKPKDTLMISRTPEVTCVVVDVSHEDPEVKFNWYVDGVEVHNAKTKPREEQYNSTYRVVSVLTVLHQDWLNGKEYKCKVSNKALGAPIEKTISKAKGQPREPQVCTLPPSRDELTKNQVSLSCAVKGFYPSDIAVEWESNGQPENNYKTTPPVLDSDGSFFLVSKLTVDKSRWQQGNVFSCSVMHEALHNHYTQKSLSLSPGKGGGGSGGGGSGGGGSKESCDVQLYIKRQSEHSILAGDPFELECPVKYCANRPHVTWCKLNGTTCVKLEDRQTSWKEEKNISFFILHFEPVLPNDNGSYRCSANFQSNLIESHSTTLYVTDVKSASERPSKDEMAS

SEQ ID NO: 748 - protein, 829 aa, Artificial Sequence
  Description of Artificial Sequence: Synthetic polypeptide
QVQLVQSGAEVKKPGASVKVSCKASGYTFTEFGMNWVRQAPGQGLEWMGWINTKTGEATYVEEFKGRVTFTTDTSTSTAYMELRSLRSDDTAVYYCARWDFAYYVEAMDYWGQGTTVTVSSASTKGPSVFPLAPSSKSTSGGTAALGCLVKDYFPEPVTVSWNSGALTSGVHTFPAVLQSSGLYSLSSVVTVPSSSLGTQTYICNVNHKPSNTKVDKKVEPKSCDGGGGSGGGGSEVQLLESGGGLVQPGGSLRLSCAASGFTFSTYAMNWVRQAPGKGLEWVSRIRSKYNNYATYYADSVKGRFTISRDDSKNTLYLQMNSLRAEDTAVYYCVRHGNFGNSYVSWFAYWGQGTLVTVSSASVAAPSVFIFPPSDEQLKSGTASVVCLLNNFYPREAKVQWKVDNALQSGNSQESVTEQDSKDSTYSLSSTLTLSKADYEKHKVYACEVTHQGLSSPVTKSFNRGECDKTHTCPPCPAPEAAGGPSVFLFPPKPKDTLMISRTPEVTCVVVDVSHEDPEVKFNWYVDGVEVHNAKTKPREEQYNSTYRVVSVLTVLHQDWLNGKEYKCKVSNKALGAPIEKTISKAKGQPREPQVYTLPPCRDELTKNQVSLWCLVKGFYPSDIAVEWESNGQPENNYKTTPPVLDSDGSFFLYSKLTVDKSRWQQGNVFSCSVMHEALHNHYTQKSLSLSPGKGGGGSGGGGSGGGGSKESCDVQLYIKRQSEHSILAGDPFELECPVKYCANRPHVTWCKLNGTTCVKLEDRQTSWKEEKNISFFILHFEPVLPNDNGSYRCSANFQSNLIESHSTTLYVTDVKSASERPSKDEMAS

SEQ ID NO: 749 - protein, 350 aa, Artificial Sequence
  Description of Artificial Sequence: Synthetic polypeptide
DIQMTQSPSSLSASVGDRVTITCKASAAVGTYVAWYQQKPGKAPKLLIYSASYRKRGVPSRFSGSGSGTDFTLTISSLQPEDFATYYCHQYYTYPLFTFGQGTKLEIKRTVAAPSVFIFPPSDEQLKSGTASVVCLLNNFYPREAKVQWKVDNALQSGNSQESVTEQDSKDSTYSLSSTLTLSKADYEKHKVYACEVTHQGLSSPVTKSFNRGECGGGGSGGGGSGGGGSKESCDVQLYIKRQSEHSILAGDPFELECPVKYCANRPHVTWCKLNGTTCVKLEDRQTSWKEEKNISFFILHFEPVLPNDNGSYRCSANFQSNLIESHSTTLYVTDVKSASERPSKDEMAS

SEQ ID NO: 750 - protein, 349 aa, Artificial Sequence
  Description of Artificial Sequence: Synthetic polypeptide
QAVVTQEPSLTVSPGGTVTLTCGSSTGAVTTSNYANWVQEKPGQAFRGLIGGTNKRAPGTPARFSGSLLGGKAALTLSGAQPEDEAEYYCALWYSNLWVFGGGTKLTVLSSASTKGPSVFPLAPSSKSTSGGTAALGCLVKDYFPEPVTVSWNSGALTSGVHTFPAVLQSSGLYSLSSVVTVPSSSLGTQTYICNVNHKPSNTKVDKKVEPKSCGGGGSGGGGSGGGGSKESCDVQLYIKRQSEHSILAGDPFELECPVKYCANRPHVTWCKLNGTTCVKLEDRQTSWKEEKNISFFILHFEPVLPNDNGSYRCSANFQSNLIESHSTTLYVTDVKSASERPSKDEMAS

SEQ ID NO: 751 - protein, 616 aa, Artificial Sequence
  Description of Artificial Sequence: Synthetic polypeptide
QVQLVQSGAEVKKPGASVKVSCKASGYTFTEFGMNWVRQAPGQGLEWMGWINTKTGEATYVEEFKGRVTFTTDTSTSTAYMELRSLRSDDTAVYYCARWDFAYYVEAMDYWGQGTTVTVSSASTKGPSVFPLAPSSKSTSGGTAALGCLVKDYFPEPVTVSWNSGALTSGVHTFPAVLQSSGLYSLSSVVTVPSSSLGTQTYICNVNHKPSNTKVDKKVEPKSCDKTHTCPPCPAPEAAGGPSVFLFPPKPKDTLMISRTPEVTCVVVDVSHEDPEVKFNWYVDGVEVHNAKTKPREEQYNSTYRVVSVLTVLHQDWLNGKEYKCKVSNKALGAPIEKTISKAKGQPREPQVCTLPPSRDELTKNQVSLSCAVKGFYPSDIAVEWESNGQPENNYKTTPPVLDSDGSFFLVSKLTVDKSRWQQGNVFSCSVMHEALHNHYTQKSLSLSPGKGGGGSGGGGSGGGGSPGWFLDSPDRPWNPPTFSPALLVVTEGDNATFTCSFSNTSESFVLNWYRMSPSNQTDKLAAFPEDRSQPGQDCRFRVTQLPNGRDFHMSVVRARRNDSGTYLCGAISLAPKAQIKESLRAELRVTERRAEVPTAHPSPSPRPAGQFQTLV

SEQ ID NO: 752 - protein, 859 aa, Artificial Sequence
  Description of Artificial Sequence: Synthetic polypeptide
QVQLVQSGAEVKKPGASVKVSCKASGYTFTEFGMNWVRQAPGQGLEWMGWINTKTGEATYVEEFKGRVTFTTDTSTSTAYMELRSLRSDDTAVYYCARWDFAYYVEAMDYWGQGTTVTVSSASTKGPSVFPLAPSSKSTSGGTAALGCLVKDYFPEPVTVSWNSGALTSGVHTFPAVLQSSGLYSLSSVVTVPSSSLGTQTYICNVNHKPSNTKVDKKVEPKSCDGGGGSGGGGSEVQLLESGGGLVQPGGSLRLSCAASGFTFSTYAMNWVRQAPGKGLEWVSRIRSKYNNYATYYADSVKGRFTISRDDSKNTLYLQMNSLRAEDTAVYYCVRHGNFGNSYVSWFAYWGQGTLVTVSSASVAAPSVFIFPPSDEQLKSGTASVVCLLNNFYPREAKVQWKVDNALQSGNSQESVTEQDSKDSTYSLSSTLTLSKADYEKHKVYACEVTHQGLSSPVTKSFNRGECDKTHTCPPCPAPEAAGGPSVFLFPPKPKDTLMISRTPEVTCVVVDVSHEDPEVKFNWYVDGVEVHNAKTKPREEQYNSTYRVVSVLTVLHQDWLNGKEYKCKVSNKALGAPIEKTISKAKGQPREPQVYTLPPCRDELTKNQVSLWCLVKGFYPSDIAVEWESNGQPENNYKTTPPVLDSDGSFFLYSKLTVDKSRWQQGNVFSCSVMHEALHNHYTQKSLSLSPGKGGGGSGGGGSGGGGSPGWFLDSPDRPWNPPTFSPALLVVTEGDNATFTCSFSNTSESFVLNWYRMSPSNQTDKLAAFPEDRSQPGQDCRFRVTQLPNGRDFHMSVVRARRNDSGTYLCGAISLAPKAQIKESLRAELRVTERRAEVPTAHPSPSPRPAGQFQTLV

SEQ ID NO: 753 - protein, 380 aa, Artificial Sequence
  Description of Artificial Sequence: Synthetic polypeptide
DIQMTQSPSSLSASVGDRVTITCKASAAVGTYVAWYQQKPGKAPKLLIYSASYRKRGVPSRFSGSGSGTDFTLTISSLQPEDFATYYCHQYYTYPLFTFGQGTKLEIKRTVAAPSVFIFPPSDEQLKSGTASVVCLLNNFYPREAKVQWKVDNALQSGNSQESVTEQDSKDSTYSLSSTLTLSKADYEKHKVYACEVTHQGLSSPVTKSFNRGECGGGGSGGGGSGGGGSPGWFLDSPDRPWNPPTFSPALLVVTEGDNATFTCSFSNTSESFVLNWYRMSPSNQTDKLAAFPEDRSQPGQDCRFRVTQLPNGRDFHMSVVRARRNDSGTYLCGAISLAPKAQIKESLRAELRVTERRAEVPTAHPSPSPRPAGQFQTLV

SEQ ID NO: 754 - protein, 379 aa, Artificial Sequence
  Description of Artificial Sequence: Synthetic polypeptide
QAVVTQEPSLTVSPGGTVTLTCGSSTGAVTTSNYANWVQEKPGQAFRGLIGGTNKRAPGTPARFSGSLLGGKAALTLSGAQPEDEAEYYCALWYSNLWVFGGGTKLTVLSSASTKGPSVFPLAPSSKSTSGGTAALGCLVKDYFPEPVTVSWNSGALTSGVHTFPAVLQSSGLYSLSSVVTVPSSSLGTQTYICNVNHKPSNTKVDKKVEPKSCGGGGSGGGGSGGGGSPGWFLDSPDRPWNPPTFSPALLVVTEGDNATFTCSFSNTSESFVLNWYRMSPSNQTDKLAAFPEDRSQPGQDCRFRVTQLPNGRDFHMSVVRARRNDSGTYLCGAISLAPKAQIKESLRAELRVTERRAEVPTAHPSPSPRPAGQFQTLV

SEQ ID NO: 755 - protein, 996 aa, Artificial Sequence
  Description of Artificial Sequence: Synthetic polypeptide
QVQLVQSGAEVKKPGASVKVSCKASGYTFTEFGMNWVRQAPGQGLEWMGWINTKTGEATYVEEFKGRVTFTTDTSTSTAYMELRSLRSDDTAVYYCARWDFAYYVEAMDYWGQGTTVTVSSASTKGPSVFPLAPSSKSTSGGTAALGCLVKDYFPEPVTVSWNSGALTSGVHTFPAVLQSSGLYSLSSVVTVPSSSLGTQTYICNVNHKPSNTKVDKKVEPKSCDKTHTCPPCPAPEAAGGPSVFLFPPKPKDTLMISRTPEVTCVVVDVSHEDPEVKFNWYVDGVEVHNAKTKPREEQYNSTYRVVSVLTVLHQDWLNGKEYKCKVSNKALGAPIEKTISKAKGQPREPQVCTLPPSRDELTKNQVSLSCAVKGFYPSDIAVEWESNGQPENNYKTTPPVLDSDGSFFLVSKLTVDKSRWQQGNVFSCSVMHEALHNHYTQKSLSLSPGKGGGGSGGGGSGGGGSMDGRFWIRVQESVMVPEGLCISVPCSFSYPRQDWTGSTPAYGYWFKAVTETTKGAPVATNHQSREVEMSTRGRFQLTGDPAKGNCSLVIRDAQMQDESQYFFRVERGSYVRYNFMNDGFFLKVTALTQKPDVYIPETLEPGQPVTVICVFNWAFEECPPPSFSWTGAALSSQGTKPTTSHFSVLSFTPRPQDHNTDLTCHVDFSRKGVSAQRTVRLRVAYAPRDLVISISRDNTPALEPQPQGNVPYLEAQKGQFLRLLCAADSQPPATLSWVLQNRVLSSSHPWGPRPLGLELPGVKAGDSGRYTCRAENRLGSQQRALDLSVQYPPENLRVMVSQANRTVLENLGNGTSLPVLEGQSLCLVCVTHSSPPARLSWTQRGQVLSPSQPSDPGVLELPRVQVEHEGEFTCHARHPLGSQHVSLSLSVHYSPKLLGPSCSWEAEGLHCSCSSQASPAPSLRWWLGEELLEGNSSQDSFEVTPSSAGPWANSSLSLHGGLSSGLRLRCEAWNVHGAQSGSILQLPDKKGLIST

SEQ ID NO: 756 - protein, 1239 aa, Artificial Sequence
  Description of Artificial Sequence: Synthetic polypeptide
QVQLVQSGAEVKKPGASVKVSCKASGYTFTEFGMNWVRQAPGQGLEWMGWINTKTGEATYVEEFKGRVTFTTDTSTSTAYMELRSLRSDDTAVYYCARWDFAYYVEAMDYWGQGTTVTVSSASTKGPSVFPLAPSSKSTSGGTAALGCLVKDYFPEPVTVSWNSGALTSGVHTFPAVLQSSGLYSLSSVVTVPSSSLGTQTYICNVNHKPSNTKVDKKVEPKSCDGGGGSGGGGSEVQLLESGGGLVQPGGSLRLSCAASGFTFSTYAMNWVRQAPGKGLEWVSRIRSKYNNYATYYADSVKGRFTISRDDSKNTLYLQMNSLRAEDTAVYYCVRHGNFGNSYVSWFAYWGQGTLVTVSSASVAAPSVFIFPPSDEQLKSGTASVVCLLNNFYPREAKVQWKVDNALQSGNSQESVTEQDSKDSTYSLSSTLTLSKADYEKHKVYACEVTHQGLSSPVTKSFNRGECDKTHTCPPCPAPEAAGGPSVFLFPPKPKDTLMISRTPEVTCVVVDVSHEDPEVKFNWYVDGVEVHNAKTKPREEQYNSTYRVVSVLTVLHQDWLNGKEYKCKVSNKALGAPIEKTISKAKGQPREPQVYTLPPCRDELTKNQVSLWCLVKGFYPSDIAVEWESNGQPENNYKTTPPVLDSDGSFFLYSKLTVDKSRWQQGNVFSCSVMHEALHNHYTQKSLSLSPGKGGGGSGGGGSGGGGSMDGRFWIRVQESVMVPEGLCISVPCSFSYPRQDWTGSTPAYGYWFKAVTETTKGAPVATNHQSREVEMSTRGRFQLTGDPAKGNCSLVIRDAQMQDESQYFFRVERGSYVRYNFMNDGFFLKVTALTQKPDVYIPETLEPGQPVTVICVFNWAFEECPPPSFSWTGAALSSQGTKPTTSHFSVLSFTPRPQDHNTDLTCHVDFSRKGVSAQRTVRLRVAYAPRDLVISISRDNTPALEPQPQGNVPYLEAQKGQFLRLLCAADSQPPATLSWVLQNRVLSSSHPWGPRPLGLELPGVKAGDSGRYTCRAENRLGSQQRALDLSVQYPPENLRVMVSQANRTVLENLGNGTSLPVLEGQSLCLVCVTHSSPPARLSWTQRGQVLSPSQPSDPGVLELPRVQVEHEGEFTCHARHPLGSQHVSLSLSVHYSPKLLGPSCSWEAEGLHCSCSSQASPAPSLRWWLGEELLEGNSSQDSFEVTPSSAGPWANSSLSLHGGLSSGLRLRCEAWNVHGAQSGSILQLPDKKGLIST

SEQ ID NO: 757 - protein, 760 aa, Artificial Sequence
  Description of Artificial Sequence: Synthetic polypeptide
DIQMTQSPSSLSASVGDRVTITCKASAAVGTYVAWYQQKPGKAPKLLIYSASYRKRGVPSRFSGSGSGTDFTLTISSLQPEDFATYYCHQYYTYPLFTFGQGTKLEIKRTVAAPSVFIFPPSDEQLKSGTASVVCLLNNFYPREAKVQWKVDNALQSGNSQESVTEQDSKDSTYSLSSTLTLSKADYEKHKVYACEVTHQGLSSPVTKSFNRGECGGGGSGGGGSGGGGSMDGRFWIRVQESVMVPEGLCISVPCSFSYPRQDWTGSTPAYGYWFKAVTETTKGAPVATNHQSREVEMSTRGRFQLTGDPAKGNCSLVIRDAQMQDESQYFFRVERGSYVRYNFMNDGFFLKVTALTQKPDVYIPETLEPGQPVTVICVFNWAFEECPPPSFSWTGAALSSQGTKPTTSHFSVLSFTPRPQDHNTDLTCHVDFSRKGVSAQRTVRLRVAYAPRDLVISISRDNTPALEPQPQGNVPYLEAQKGQFLRLLCAADSQPPATLSWVLQNRVLSSSHPWGPRPLGLELPGVKAGDSGRYTCRAENRLGSQQRALDLSVQYPPENLRVMVSQANRTVLENLGNGTSLPVLEGQSLCLVCVTHSSPPARLSWTQRGQVLSPSQPSDPGVLELPRVQVEHEGEFTCHARHPLGSQHVSLSLSVHYSPKLLGPSCSWEAEGLHCSCSSQASPAPSLRWWLGEELLEGNSSQDSFEVTPSSAGPWANSSLSLHGGLSSGLRLRCEAWNVHGAQSGSILQLPDKKGLIST

SEQ ID NO: 758 - protein, 759 aa, Artificial Sequence
  Description of Artificial Sequence: Synthetic polypeptide
QAVVTQEPSLTVSPGGTVTLTCGSSTGAVTTSNYANWVQEKPGQAFRGLIGGTNKRAPGTPARFSGSLLGGKAALTLSGAQPEDEAEYYCALWYSNLWVFGGGTKLTVLSSASTKGPSVFPLAPSSKSTSGGTAALGCLVKDYFPEPVTVSWNSGALTSGVHTFPAVLQSSGLYSLSSVVTVPSSSLGTQTYICNVNHKPSNTKVDKKVEPKSCGGGGSGGGGSGGGGSMDGRFWIRVQESVMVPEGLCISVPCSFSYPRQDWTGSTPAYGYWFKAVTETTKGAPVATNHQSREVEMSTRGRFQLTGDPAKGNCSLVIRDAQMQDESQYFFRVERGSYVRYNFMNDGFFLKVTALTQKPDVYIPETLEPGQPVTVICVFNWAFEECPPPSFSWTGAALSSQGTKPTTSHFSVLSFTPRPQDHNTDLTCHVDFSRKGVSAQRTVRLRVAYAPRDLVISISRDNTPALEPQPQGNVPYLEAQKGQFLRLLCAADSQPPATLSWVLQNRVLSSSHPWGPRPLGLELPGVKAGDSGRYTCRAENRLGSQQRALDLSVQYPPENLRVMVSQANRTVLENLGNGTSLPVLEGQSLCLVCVTHSSPPARLSWTQRGQVLSPSQPSDPGVLELPRVQVEHEGEFTCHARHPLGSQHVSLSLSVHYSPKLLGPSCSWEAEGLHCSCSSQASPAPSLRWWLGEELLEGNSSQDSFEVTPSSAGPWANSSLSLHGGLSSGLRLRCEAWNVHGAQSGSILQLPDKKGLIST

SEQ ID NO: 759 - protein, 585 aa, Artificial Sequence
  Description of Artificial Sequence: Synthetic polypeptide
QVQLVQSGAEVKKPGASVKVSCKASGYTFTEFGMNWVRQAPGQGLEWMGWINTKTGEATYVEEFKGRVTFTTDTSTSTAYMELRSLRSDDTAVYYCARWDFAYYVEAMDYWGQGTTVTVSSASTKGPSVFPLAPSSKSTSGGTAALGCLVKDYFPEPVTVSWNSGALTSGVHTFPAVLQSSGLYSLSSVVTVPSSSLGTQTYICNVNHKPSNTKVDKKVEPKSCDKTHTCPPCPAPEAAGGPSVFLFPPKPKDTLMISRTPEVTCVVVDVSHEDPEVKFNWYVDGVEVHNAKTKPREEQYNSTYRVVSVLTVLHQDWLNGKEYKCKVSNKALGAPIEKTISKAKGQPREPQVCTLPPSRDELTKNQVSLSCAVKGFYPSDIAVEWESNGQPENNYKTTPPVLDSDGSFFLVSKLTVDKSRWQQGNVFSCSVMHEALHNHYTQKSLSLSPGKGGGGSGGGGSGGGGSEEELQVIQPDKSVLVAAGETATLRCTATSLIPVGPIQWFRGAGPGRELIYNQKEGHFPRVTTVSDLTKRNNMDFSIRIGNITPADAGTYYCVKFRKGSPDDVEFKSGAGTELSVRAKPS

SEQ ID NO: 760 - protein, 828 aa, Artificial Sequence
  Description of Artificial Sequence: Synthetic polypeptide
QVQLVQSGAEVKKPGASVKVSCKASGYTFTEFGMNWVRQAPGQGLEWMGWINTKTGEATYVEEFKGRVTFTTDTSTSTAYMELRSLRSDDTAVYYCARWDFAYYVEAMDYWGQGTTVTVSSASTKGPSVFPLAPSSKSTSGGTAALGCLVKDYFPEPVTVSWNSGALTSGVHTFPAVLQSSGLYSLSSVVTVPSSSLGTQTYICNVNHKPSNTKVDKKVEPKSCDGGGGSGGGGSEVQLLESGGGLVQPGGSLRLSCAASGFTFSTYAMNWVRQAPGKGLEWVSRIRSKYNNYATYYADSVKGRFTISRDDSKNTLYLQMNSLRAEDTAVYYCVRHGNFGNSYVSWFAYWGQGTLVTVSSASVAAPSVFIFPPSDEQLKSGTASVVCLLNNFYPREAKVQWKVDNALQSGNSQESVTEQDSKDSTYSLSSTLTLSKADYEKHKVYACEVTHQGLSSPVTKSFNRGECDKTHTCPPCPAPEAAGGPSVFLFPPKPKDTLMISRTPEVTCVVVDVSHEDPEVKFNWYVDGVEVHNAKTKPREEQYNSTYRVVSVLTVLHQDWLNGKEYKCKVSNKALGAPIEKTISKAKGQPREPQVYTLPPCRDELTKNQVSLWCLVKGFYPSDIAVEWESNGQPENNYKTTPPVLDSDGSFFLYSKLTVDKSRWQQGNVFSCSVMHEALHNHYTQKSLSLSPGKGGGGSGGGGSGGGGSEEELQVIQPDKSVLVAAGETATLRCTATSLIPVGPIQWFRGAGPGRELIYNQKEGHFPRVTTVSDLTKRNNMDFSIRIGNITPADAGTYYCVKFRKGSPDDVEFKSGAGTELSVRAKPS

SEQ ID NO: 761 - protein, 349 aa, Artificial Sequence
  Description of Artificial Sequence: Synthetic polypeptide
DIQMTQSPSSLSASVGDRVTITCKASAAVGTYVAWYQQKPGKAPKLLIYSASYRKRGVPSRFSGSGSGTDFTLTISSLQPEDFATYYCHQYYTYPLFTFGQGTKLEIKRTVAAPSVFIFPPSDEQLKSGTASVVCLLNNFYPREAKVQWKVDNALQSGNSQESVTEQDSKDSTYSLSSTLTLSKADYEKHKVYACEVTHQGLSSPVTKSFNRGECGGGGSGGGGSGGGGSEEELQVIQPDKSVLVAAGETATLRCTATSLIPVGPIQWFRGAGPGRELIYNQKEGHFPRVTTVSDLTKRNNMDFSIRIGNITPADAGTYYCVKFRKGSPDDVEFKSGAGTELSVRAKPS

SEQ ID NO: 762 - protein, 348 aa, Artificial Sequence
  Description of Artificial Sequence: Synthetic polypeptide
QAVVTQEPSLTVSPGGTVTLTCGSSTGAVTTSNYANWVQEKPGQAFRGLIGGTNKRAPGTPARFSGSLLGGKAALTLSGAQPEDEAEYYCALWYSNLWVFGGGTKLTVLSSASTKGPSVFPLAPSSKSTSGGTAALGCLVKDYFPEPVTVSWNSGALTSGVHTFPAVLQSSGLYSLSSVVTVPSSSLGTQTYICNVNHKPSNTKVDKKVEPKSCGGGGSGGGGSGGGGSEEELQVIQPDKSVLVAAGETATLRCTATSLIPVGPIQWFRGAGPGRELIYNQKEGHFPRVTTVSDLTKRNNMDFSIRIGNITPADAGTYYCVKFRKGSPDDVEFKSGAGTELSVRAKPS

SEQ ID NO: 763 - protein, 603 aa, Artificial Sequence
  Description of Artificial Sequence: Synthetic polypeptide
QVQLVQSGAEVKKPGASVKVSCKASGYTFTEFGMNWVRQAPGQGLEWMGWINTKTGEATYVEEFKGRVTFTTDTSTSTAYMELRSLRSDDTAVYYCARWDFAYYVEAMDYWGQGTTVTVSSASTKGPSVFPLAPSSKSTSGGTAALGCLVKDYFPEPVTVSWNSGALTSGVHTFPAVLQSSGLYSLSSVVTVPSSSLGTQTYICNVNHKPSNTKVDKKVEPKSCDKTHTCPPCPAPEAAGGPSVFLFPPKPKDTLMISRTPEVTCVVVDVSHEDPEVKFNWYVDGVEVHNAKTKPREEQYNSTYRVVSVLTVLHQDWLNGKEYKCKVSNKALGAPIEKTISKAKGQPREPQVCTLPPSRDELTKNQVSLSCAVKGFYPSDIAVEWESNGQPENNYKTTPPVLDSDGSFFLVSKLTVDKSRWQQGNVFSCSVMHEALHNHYTQKSLSLSPGKGGGGSGGGGSGGGGSTIPPHVQKSVNNDMIVTDNNGAVKFPQLCKFCDVRFSTCDNQKSCMSNCSITSICEKPQEVCVAVWRKNDENITLETVCHDPKLPYHDFILEDAASPKCIMKEKKKPGETFFMCSCSSDECNDNIIFSEEYNTSNPD

SEQ ID NO: 764 - protein, 846 aa, Artificial Sequence
  Description of Artificial Sequence: Synthetic polypeptide
QVQLVQSGAEVKKPGASVKVSCKASGYTFTEFGMNWVRQAPGQGLEWMGWINTKTGEATYVEEFKGRVTFTTDTSTSTAYMELRSLRSDDTAVYYCARWDFAYYVEAMDYWGQGTTVTVSSASTKGPSVFPLAPSSKSTSGGTAALGCLVKDYFPEPVTVSWNSGALTSGVHTFPAVLQSSGLYSLSSVVTVPSSSLGTQTYICNVNHKPSNTKVDKKVEPKSCDGGGGSGGGGSEVQLLESGGGLVQPGGSLRLSCAASGFTFSTYAMNWVRQAPGKGLEWVSRIRSKYNNYATYYADSVKGRFTISRDDSKNTLYLQMNSLRAEDTAVYYCVRHGNFGNSYVSWFAYWGQGTLVTVSSASVAAPSVFIFPPSDEQLKSGTASVVCLLNNFYPREAKVQWKVDNALQSGNSQESVTEQDSKDSTYSLSSTLTLSKADYEKHKVYACEVTHQGLSSPVTKSFNRGECDKTHTCPPCPAPEAAGGPSVFLFPPKPKDTLMISRTPEVTCVVVDVSHEDPEVKFNWYVDGVEVHNAKTKPREEQYNSTYRVVSVLTVLHQDWLNGKEYKCKVSNKALGAPIEKTISKAKGQPREPQVYTLPPCRDELTKNQVSLWCLVKGFYPSDIAVEWESNGQPENNYKTTPPVLDSDGSFFLYSKLTVDKSRWQQGNVFSCSVMHEALHNHYTQKSLSLSPGKGGGGSGGGGSGGGGSTIPPHVQKSVNNDMIVTDNNGAVKFPQLCKFCDVRFSTCDNQKSCMSNCSITSICEKPQEVCVAVWRKNDENITLETVCHDPKLPYHDFILEDAASPKCIMKEKKKPGETFFMCSCSSDECNDNIIFSEEYNTSNPD

SEQ ID NO: 765 - protein, 647 aa, Artificial Sequence
  Description of Artificial Sequence: Synthetic polypeptide
QVQLVQSGAEVKKPGASVKVSCKASGYTFTEFGMNWVRQAPGQGLEWMGWINTKTGEATYVEEFKGRVTFTTDTSTSTAYMELRSLRSDDTAVYYCARWDFAYYVEAMDYWGQGTTVTVSSASTKGPSVFPLAPSSKSTSGGTAALGCLVKDYFPEPVTVSWNSGALTSGVHTFPAVLQSSGLYSLSSVVTVPSSSLGTQTYICNVNHKPSNTKVDKKVEPKSCDKTHTCPPCPAPEAAGGPSVFLFPPKPKDTLMISRTPEVTCVVVDVSHEDPEVKFNWYVDGVEVHNAKTKPREEQYNSTYRVVSVLTVLHQDWLNGKEYKCKVSNKALGAPIEKTISKAKGQPREPQVCTLPPSRDELTKNQVSLSCAVKGFYPSDIAVEWESNGQPENNYKTTPPVLDSDGSFFLVSKLTVDKSRWQQGNVFSCSVMHEALHNHYTQKSLSLSPGKGGGGSGGGGSGGGGSSEVEYRAEVGQNAYLPCFYTPAAPGNLVPVCWGKGACPVFECGNVVLRTDERDVNYWTSRYWLNGDFRKGDVSLTIENVTLADSGIYCCRIQIPGIMNDEKFNLKLVIKPAKVTPAPTRQRDFTAAFPRMLTTRGHGPAETQTLGSLPDINLTQISTLANELRDSRLANDLRDSGATIRIG

SEQ ID NO: 766 - protein, 890 aa, Artificial Sequence
  Description of Artificial Sequence: Synthetic polypeptide
QVQLVQSGAEVKKPGASVKVSCKASGYTFTEFGMNWVRQAPGQGLEWMGWINTKTGEATYVEEFKGRVTFTTDTSTSTAYMELRSLRSDDTAVYYCARWDFAYYVEAMDYWGQGTTVTVSSASTKGPSVFPLAPSSKSTSGGTAALGCLVKDYFPEPVTVSWNSGALTSGVHTFPAVLQSSGLYSLSSVVTVPSSSLGTQTYICNVNHKPSNTKVDKKVEPKSCDGGGGSGGGGSEVQLLESGGGLVQPGGSLRLSCAASGFTFSTYAMNWVRQAPGKGLEWVSRIRSKYNNYATYYADSVKGRFTISRDDSKNTLYLQMNSLRAEDTAVYYCVRHGNFGNSYVSWFAYWGQGTLVTVSSASVAAPSVFIFPPSDEQLKSGTASVVCLLNNFYPREAKVQWKVDNALQSGNSQESVTEQDSKDSTYSLSSTLTLSKADYEKHKVYACEVTHQGLSSPVTKSFNRGECDKTHTCPPCPAPEAAGGPSVFLFPPKPKDTLMISRTPEVTCVVVDVSHEDPEVKFNWYVDGVEVHNAKTKPREEQYNSTYRVVSVLTVLHQDWLNGKEYKCKVSNKALGAPIEKTISKAKGQPREPQVYTLPPCRDELTKNQVSLWCLVKGFYPSDIAVEWESNGQPENNYKTTPPVLDSDGSFFLYSKLTVDKSRWQQGNVFSCSVMHEALHNHYTQKSLSLSPGKGGGGSGGGGSGGGGSSEVEYRAEVGQNAYLPCFYTPAAPGNLVPVCWGKGACPVFECGNVVLRTDERDVNYWTSRYWLNGDFRKGDVSLTIENVTLADSGIYCCRIQIPGIMNDEKFNLKLVIKPAKVTPAPTRQRDFTAAFPRMLTTRGHGPAETQTLGSLPDINLTQISTLANELRDSRLANDLRDSGATIRIG

SEQ ID NO: 767 - protein, 411 aa, Artificial Sequence
  Description of Artificial Sequence: Synthetic polypeptide
DIQMTQSPSSLSASVGDRVTITCKASAAVGTYVAWYQQKPGKAPKLLIYSASYRKRGVPSRFSGSGSGTDFTLTISSLQPEDFATYYCHQYYTYPLFTFGQGTKLEIKRTVAAPSVFIFPPSDEQLKSGTASVVCLLNNFYPREAKVQWKVDNALQSGNSQESVTEQDSKDSTYSLSSTLTLSKADYEKHKVYACEVTHQGLSSPVTKSFNRGECGGGGSGGGGSGGGGSSEVEYRAEVGQNAYLPCFYTPAAPGNLVPVCWGKGACPVFECGNVVLRTDERDVNYWTSRYWLNGDFRKGDVSLTIENVTLADSGIYCCRIQIPGIMNDEKFNLKLVIKPAKVTPAPTRQRDFTAAFPRMLTTRGHGPAETQTLGSLPDINLTQISTLANELRDSRLANDLRDSGATIRIG

SEQ ID NO: 768 - protein, 410 aa, Artificial Sequence
  Description of Artificial Sequence: Synthetic polypeptide
QAVVTQEPSLTVSPGGTVTLTCGSSTGAVTTSNYANWVQEKPGQAFRGLIGGTNKRAPGTPARFSGSLLGGKAALTLSGAQPEDEAEYYCALWYSNLWVFGGGTKLTVLSSASTKGPSVFPLAPSSKSTSGGTAALGCLVKDYFPEPVTVSWNSGALTSGVHTFPAVLQSSGLYSLSSVVTVPSSSLGTQTYICNVNHKPSNTKVDKKVEPKSCGGGGSGGGGSGGGGSSEVEYRAEVGQNAYLPCFYTPAAPGNLVPVCWGKGACPVFECGNVVLRTDERDVNYWTSRYWLNGDFRKGDVSLTIENVTLADSGIYCCRIQIPGIMNDEKFNLKLVIKPAKVTPAPTRQRDFTAAFPRMLTTRGHGPAETQTLGSLPDINLTQISTLANELRDSRLANDLRDSGATIRIG

SEQ ID NO: 769 - protein, 671 aa, Artificial Sequence
  Description of Artificial Sequence: Synthetic polypeptide
QVQLVQSGAEVKKPGASVKVSCKASGYTFTEFGMNWVRQAPGQGLEWMGWINTKTGEATYVEEFKGRVTFTTDTSTSTAYMELRSLRSDDTAVYYCARWDFAYYVEAMDYWGQGTTVTVSSASTKGPSVFPLAPSSKSTSGGTAALGCLVKDYFPEPVTVSWNSGALTSGVHTFPAVLQSSGLYSLSSVVTVPSSSLGTQTYICNVNHKPSNTKVDKKVEPKSCDKTHTCPPCPAPEAAGGPSVFLFPPKPKDTLMISRTPEVTCVVVDVSHEDPEVKFNWYVDGVEVHNAKTKPREEQYNSTYRVVSVLTVLHQDWLNGKEYKCKVSNKALGAPIEKTISKAKGQPREPQVCTLPPSRDELTKNQVSLSCAVKGFYPSDIAVEWESNGQPENNYKTTPPVLDSDGSFFLVSKLTVDKSRWQQGNVFSCSVMHEALHNHYTQKSLSLSPGKGGGGSGGGGSGGGGSSDTGRPFVEMYSEIPEIIHMTEGRELVIPCRVTSPNITVTLKKFPLDTLIPDGKRIIWDSRKGFIISNATYKEIGLLTCEATVNGHLYKTNYLTHRQTNTIIDVVLSPSHGIELSVGEKLVLNCTARTELNVGIDFNWEYPSSKHQHKKLVNRDLKTQSGSEMKKFLSTLTIDGVTRSDQGLYTCAASSGLMTKKNSTFVRVHEK

SEQ ID NO: 770 - protein, 914 aa, Artificial Sequence
  Description of Artificial Sequence: Synthetic polypeptide
QVQLVQSGAEVKKPGASVKVSCKASGYTFTEFGMNWVRQAPGQGLEWMGWINTKTGEATYVEEFKGRVTFTTDTSTSTAYMELRSLRSDDTAVYYCARWDFAYYVEAMDYWGQGTTVTVSSASTKGPSVFPLAPSSKSTSGGTAALGCLVKDYFPEPVTVSWNSGALTSGVHTFPAVLQSSGLYSLSSVVTVPSSSLGTQTYICNVNHKPSNTKVDKKVEPKSCDGGGGSGGGGSEVQLLESGGGLVQPGGSLRLSCAASGFTFSTYAMNWVRQAPGKGLEWVSRIRSKYNNYATYYADSVKGRFTISRDDSKNTLYLQMNSLRAEDTAVYYCVRHGNFGNSYVSWFAYWGQGTLVTVSSASVAAPSVFIFPPSDEQLKSGTASVVCLLNNFYPREAKVQWKVDNALQSGNSQESVTEQDSKDSTYSLSSTLTLSKADYEKHKVYACEVTHQGLSSPVTKSFNRGECDKTHTCPPCPAPEAAGGPSVFLFPPKPKDTLMISRTPEVTCVVVDVSHEDPEVKFNWYVDGVEVHNAKTKPREEQYNSTYRVVSVLTVLHQDWLNGKEYKCKVSNKALGAPIEKTISKAKGQPREPQVYTLPPCRDELTKNQVSLWCLVKGFYPSDIAVEWESNGQPENNYKTTPPVLDSDGSFFLYSKLTVDKSRWQQGNVFSCSVMHEALHNHYTQKSLSLSPGKGGGGSGGGGSGGGGSSDTGRPFVEMYSEIPEIIHMTEGRELVIPCRVTSPNITVTLKKFPLDTLIPDGKRIIWDSRKGFIISNATYKEIGLLTCEATVNGHLYKTNYLTHRQTNTIIDVVLSPSHGIELSVGEKLVLNCTARTELNVGIDFNWEYPSSKHQHKKLVNRDLKTQSGSEMKKFLSTLTIDGVTRSDQGLYTCAASSGLMTKKNSTFVRVHEK

SEQ ID NO: 771 - protein, 50 aa, Artificial Sequence
  Description of Artificial Sequence: Synthetic polypeptide
  MISC_FEATURE (1)..(50): This sequence may encompass 1-10 "Gly Gly Gly Gly Ser" repeating units
GGGGSGGGGSGGGGSGGGGSGGGGSGGGGSGGGGSGGGGSGGGGSGGGGS

SEQ ID NO: 772 - protein, 60 aa, Artificial Sequence
  Description of Artificial Sequence: Synthetic polypeptide
  MISC_FEATURE (1)..(60): This sequence may encompass 1-10 "Gly Gly Ser Gly Gly Ser" repeating units
GGSGGSGGSGGSGGSGGSGGSGGSGGSGGSGGSGGSGGSGGSGGSGGSGGSGGSGGSGGS

SEQ ID NO: 773 - protein, 50 aa, Artificial Sequence
  Description of Artificial Sequence: Synthetic polypeptide
  MISC_FEATURE (1)..(50): This sequence may encompass 1-10 "Glu Ala Ala Ala Lys" repeating units
EAAAKEAAAKEAAAKEAAAKEAAAKEAAAKEAAAKEAAAKEAAAKEAAAK

SEQ ID NO: 774 - protein, 52 aa, Artificial Sequence
  Description of Artificial Sequence: Synthetic polypeptide
  MISC_FEATURE (2)..(51): This region may encompass 1-10 "Glu Ala Ala Ala Lys" repeating units
AEAAAKEAAAKEAAAKEAAAKEAAAKEAAAKEAAAKEAAAKEAAAKEAAAKA

SEQ ID NO: 775 - protein, 10 aa, Artificial Sequence
  Description of Artificial Sequence: Synthetic peptide
  MISC_FEATURE (1)..(10): This sequence may encompass 6-10 residues
GGGGGGGGGG

1-232. (canceled)

233. An isolated molecule comprising a targeting moiety and a ligand trap, wherein
(a) the targeting moiety comprises a polypeptide that inhibits SIRPa binding to CD47; and
(b) the ligand trap comprises an amino acid sequence of the extracellular domain of Transforming growth factor-beta receptor (TGFbR) or a ligand binding fragment thereof.

234. The molecule of claim 233, wherein the targeting moiety comprises an antibody, antibody fragment, antigen-binding domain of an immunoglobulin, single chain variable fragment (scFv), Fc-containing polypeptide, or fusion protein.

235. The molecule of claim 233, wherein the targeting moiety specifically binds SIRPa.

236. The molecule of claim 233, wherein the targeting moiety specifically binds CD47.

237. The molecule of claim 236, wherein the targeting moiety comprises an amino acid sequence of the extracellular domain of SIRPa or a ligand-binding fragment thereof.

238. The molecule of claim 237, wherein the targeting moiety comprises the amino acid sequence corresponding to SEQ ID NO: 174 or a ligand-binding fragment thereof.

239. The molecule of claim 233, wherein the ligand trap comprises an amino acid sequence of the extracellular domain of Transforming growth factor-beta receptor II (TGFbRII) or a ligand-binding fragment thereof.

240. The molecule of claim 239, wherein the ligand trap comprises the amino acid sequence corresponding to SEQ ID NO: 177 or a ligand-binding fragment thereof.

241. The molecule of claim 233, wherein the ligand trap is fused to the targeting moiety via a linker.

242. The molecule of claim 241, wherein the targeting moiety is an Fc-containing polypeptide.

243. The molecule of claim 242, wherein the ligand is trap fused to the targeting moiety via a linker attached to the C terminus of the CH3 region of the Fc-containing polypeptide.

244. The molecule of claim 241, wherein the linker is a flexible linker.

245. The molecule of claim 244, wherein the linker is (GGGGS)n and n is between 1 and 10.

246. The molecule of claim 233, wherein the molecule is a fusion protein comprising the amino acid sequence set forth in SEQ ID NO: 550 or 556.

247. The molecule of claim 233, wherein the molecule is a polypeptide comprising the amino acid sequence set forth in SEQ ID NOs: 390 and 22.

248. A method of treating a neoplastic disease or cancer comprising administrating to a subject in need thereof the molecule of claim 233, thereby treating the neoplastic disease or cancer.

249. The method of claim 248, further comprising administering a therapeutic agent.

250. The method of claim 249, wherein the therapeutic agent is an antibody, antibody-drug conjugate, chemotherapeutic agent, or anti-angiogenic agent.

251. The method of claim 250, wherein the anti-angiogenic agent is a polypeptide that binds VEGF, a polypeptide that binds VEGFR, or a VEGFR kinase inhibitor.

252. The method of claim 251, wherein the therapeutic agent is an immune checkpoint inhibitor or vaccine.
